(19) United States
(12) Patent Application Publication
(10) Pub. No.: US 2023/0371483 A1
(43) Pub. Date: Nov. 23, 2023

(54) METHODS AND COMPOSITIONS FOR SEXING AND STERILIZATION IN DROSOPHILA SUZUKII AND AEDES AEGYPTI

(71) Applicant: The Regents of the University of California, Oakland, CA (US)

(72) Inventors: Omar Akbari, La Jolla, CA (US); Ming Li, La Jolla, CA (US); Ting Yang, La Jolla, CA (US); Nikolay Kandul, La Jolla, CA (US)

(21) Appl. No.: 17/629,348

(22) PCT Filed: Jul. 24, 2020
(86) PCT No.: PCT/US2020/043618

§ 371 Date: Jan. 21, 2022

Related U.S. Application Data
(60) Provisional application No. 62/878,642, filed on Jul. 25, 2019.
(60) Provisional application No. 62/929,480, filed on Nov. 1, 2019.

(51) Int. Cl. A01K 67/033; C12N 15/11; C12N 9/22; C12N 15/90

(52) U.S. Cl. CPC A01K 67/0339; C12N 15/11; C12N 9/22; C12N 15/902; A01K 2227/706; A01K 2217/077; C12N 2310/20

(57) ABSTRACT

Provided herein is a next-generation highly-efficient technology that can be used for biocontrol of D. suzukii and/or Aedes aegypti. The composition and technique termed precision guided SIT (pgSIT) functions by exploiting the precision and accuracy of CRISPR to simultaneously disrupt genes essential for either female viability or male fertility. It utilizes a simple breeding scheme requiring two homozygous strains—one expressing Cas9 and the other expressing double guide RNAs (dgRNAs). A single mating between these strains mechanistically results in synchronous RNA-guided dominant biallelic knockouts of both target genes throughout development, resulting in the complete penetrance of desired phenotypes in all progeny. This document provides methods and compositions relating to producing such insect eggs, insects, insect populations and uses thereof in reducing a wild-type insect population, along with methods and materials for producing genetically modified progeny of D. suzukii and/or Aedes aegypti.

### CROSS-REFERENCE TO RELATED APPLICATION

[0001] This application claims the benefit under 35 U.S.C. 119(e) of U.S. Provisional Serial Nos. 62/878,642, filed Jul. 25, 2019, and 62/929,480, filed Nov. 1, 2019, the contents of each of which are incorporated herein by reference in their entireties.

### STATEMENT AS TO FEDERALLY SPONSORED RESEARCH

[0002] This invention was made with government support under Grant No. HR0011-17-2-0047 awarded by the Defense Advanced Research Projects Agency. The Government has certain rights in the invention.

### SEQUENCE LISTING

[0003] The instant application contains a Sequence Listing which has been submitted electronically in ASCII format and is hereby incorporated by reference in its entisrety. Said ASCII copy, created on Jul. 24, 2020, is named 114198-0990_SequenceListing_ST25.txt and is 765,952 bytes in size.

### TECHNICAL FIELD

[0004] This document relates to methods and materials for producing genetically modified progeny of an Aedes aegypti mosquito or a Drosophila suzukii.

### BACKGROUND

[0005] Drosophila suzukii (Spotted Wing Drosophila, SWD) is a major invasive pest of ripening small fruit including raspberries, blueberries, strawberries, and cherries (Walsh et al. 2011; Stockton, Wallingford, and Loeb 2018). It has caused significant worldwide economic losses including significant damage in the berry- and cherry-growing industries of western North America (Stockton, Wallingford, and Loeb 2018; Ioriatti et al. 2015; Van Steenwyk and Bolda 2014; Walton et al. 2014). Achieving effective control of D. suzukii has been difficult in a number of crop systems including cherries (Van Timmeren et al. 2017; Mazzi et al. 2017), and control measures have largely relied on prophylactic application of expensive broad spectrum insecticides (Haye et al. 2016; Van Timmeren et al. 2017; Mazzi et al. 2017; Schetelig et al. 2018). This is problematic, as the repeated use of broad-spectrum insecticides has led to disruption of integrated pest management systems developed for crops such as cherries and berries, and has had a serious impact on beneficial arthropods, resulting, for example, in an increased use of miticides (Van Steenwyk and Bolda 2014). Additionally, broad use of insecticides makes it inevitable that resistance will become a major problem in the foreseeable future (Haye et al. 2016), increases the risk of residues on fruits, and arouses public concern (Van Timmeren et al. 2017). However, there are no effective alternatives to managing D. suzukii infestation, and it is likely that, unless more effective control measures are developed, this pest will continue to spread (Haye et al. 2016).

[0006] Additionally, the annual incidence of vector-borne disease exceeds 1 billion globally with mosquito-diseases comprising the majority of the global vector-borne disease burden (World Health Organization 2014). There are currently no vaccines for most mosquito-borne diseases, so prevention, mainly through vector control, is the primary method to reduce disease burden.

[0007] Chemical insecticides have historically been an important tool for mosquito control, but they have limitations, most notably their limited efficacy due to increasing vector insecticide resistance and their lack of species specificity. While many insecticide driven approaches have been successful in some disease prevention programs (Pluess et al. 2010), for a myriad of reasons, they have mixed results overall (Esu et al. 2010; George et al. 2015; Maciel-de-Freitas et al. 2014). Even in areas where sustained vector control has been achieved in the past, insecticide resistance has greatly reduced or eliminated the impact of vector control on disease transmission (Liu 2015; Hemingway, Field, and Vontas 2002; Maciel-de-Freitas et al. 2014). Due to the widespread use of insecticides and the limited number of insecticide families available to vector control programs, insecticide resistance will continue to be a barrier to insecticide-based vector control.

[0008] Sterile insect technique (SIT) is the gold standard for insect population suppression. In classic SIT, insects are irradiated with ionizing radiation to induce male sterility. The sterile males are then released to mate with wild females resulting in non-viable progeny. Over time, repeated mass releases of sterile males suppresses and can even eliminate the target population. This approach was used to eradicate the screwworm fly, Cochliomyia hominivorax, (Krafsur et al. 1986), the Mexican fruit fly, Anastrepha ludens, and the Mediterranean fruit fly, Ceratitis capitata, from regions of North America (Hendrichs et al. 2002). Notwithstanding, in mosquitoes irradiation-based SIT causes high male mortality and fitness costs. Recent field studies release of irradiated, sterile, male Aedes albopictus led to very limited population reduction (Bellini et al. 2013) likely for these reasons. While the classic irradiation-based SIT presents an environment-friendly method of a local population suppression, it is not currently feasible or scalable for the control of mosquito populations.

[0009] In recent years innovative genetic vector control methods, such as the Release of Insects Carrying a Dominant Lethal (MDL) (Thomas et al. 2000), have demonstrated large reductions in wild vector populations (Carvalho et al. 2015; Harris et al. 2012). Other novel disease or vector control methods, such as the DENV and ZIKV transmission blocking Wolbachia infected Aedes aegypti and the Wolbachia Incompatible Insect Technique (Wolbachia IIT), respectively, are currently being evaluated in the field (Schmidt et al. 2017). While effective, these methods require large numbers of mosquitoes to be raised, manually sexed and released as adults in the field, near target sites. Building mosquito mass rearing factories in local disease endemic areas is costly, labor-intensive and current procedures are error-prone (Gilles et al. 2014; Papathanos et al. 2009). Female release, even in small numbers, is particularly problematic to the Wolbachia technology as this will immunize the target population to the incompatible Wolbachia strain and ultimately lead to the failure of the approach. Some studies even indicate that in some contexts, Wolbachia enhances pathogen infection (Hughes, Rivero, and Rasgon 2014; Dodson et al. 2014) or can cause large vector fitness costs (Joshi et al. 2014). Additionally, the antibiotic drugs required for MDL mosquitoes have high male fitness-costs (˜5% that of wt male fitness, based on MDL field trials in the Cayman Islands (Harris et al. 2011) and Brazil (Carvalho et al. 2015) resulting from the loss or alteration of gut microbiome or symbiotic bacteria as well as toxicity to mitochondrial cell functions (Moullan et al. 2015; Chatzispyrou et al. 2015).

[0010] Therefore, there is still an urgent need for new vector control technologies for the suppression of wild populations of, e.g., an Aedes aegypti mosquito or a Drosophila suzukii.

### SUMMARY OF THE DISCLOSURE

[0011] This disclosure provides a mating system producing a genetically modified progeny that is a sterile male insect of Drosophila suzukii or Aedes aegypti mosquito. The method comprises, or consists essentially of, or yet further consists of a genetically modified first parental insect and a genetically modified second parental insect. In one embodiment, the first genetically modified parental insect comprises or has been transduced or transfected with at least one nucleic acid sequence that comprises, or consists essentially of, or yet further consists of (a) at least a first guide RNA targeting a female essential genomic sequence that is required for female-specific viability in Drosophila suzukii or Aedes aegypti, and (b) at least a second guide RNA targeting a male sterility genomic sequence that is required for male-specific fertility in Drosophila suzukii or Aedes aegypti. Additionally or alternatively, the second parental insect comprises or has been transduced with a nucleic acid that encodes an endonuclease under the control of a regulatory sequence that is suitable for directing protein expression in Drosophila suzukii or Aedes aegypti.

[0012] In some embodiments, the targeted sequence required for female-specific viability in Aedes aegypti is the Intersex or the labrum (Lab) gene. In another embodiment, the targeted sequence required for male-specific fertility in Aedes aegypti is a sequence of the zero population growth (Zpg)1 gene. Additionally or alternatively, the targeted sequence required for male-specific fertility in Drosophila suzukii is selected from a sequence of Cannonball (Can), meiosis I arrest (Mia), P-element induced wimpy testis (PIWI), Heterochromatin Protein 1e (HP1e), zero population growth (Zpg), male sterile (3) K81 (K81), misfire (Mfr), or sneaky (Snky). In a further embodiment, the targeted sequence is a sequence in the gene exon of the genes that disclosed herein.

[0013] In some embodiments, the targeted sequence required for female-specific viability in Drosophila suzukii is GGCGGCAGCGGCGGGAATGG (Sxl—Max Scott site, SEQ ID NO: 82). In another embodiment, the targeted sequence required for male-specific fertility in Drosophila suzukii is selected from: TGGCGGTACCGGCTCCGGAA (Btub Original site 2, SEQ ID NO: 83), CTTGAGTGTGCACCAGCTGG (Btub site 2, SEQ ID NO: 84), CAATGCGGTAACCAGATCGG (Btub site 3, SEQ ID NO: 85), GCCTCGGGGTCTAAAGATGT (Btub site 4, SEQ ID NO: 86), GCTACAGAGGAATGGCCCAG (Cannonball (Can), SEQ ID NO: 66), GGATCGGGATAACCTGCCGT (Cannonball (Can), SEQ ID NO: 67), GAGAATCCCCTTGTTGCGGG (meiosis I arrest (Mia), SEQ ID NO: 68), GAGCTCTGACCATCCGCATG (meiosis I arrest (Mia), SEQ ID NO: 69), GGTGTTGGACAGCACATCGA (P-element induced wimpy testis (PIWI), SEQ ID NO: 70), GAGCACACGTGATCGCAAGA (P-element induced wimpy testis (PIWI), SEQ ID NO: 71), CAACCTCAAgTTGTaCCAAG (Heterochromatin Protein 1e (HP1e), SEQ ID NO: 72), GGATTATCCAAAACTAAGCA (Heterochromatin Protein 1e (HP1e), SEQ ID NO: 73), GCAACTGCAAACGCATTCCG (zero population growth (Zpg), SEQ ID NO: 74), GCCCAAGTTGCACCTGCAGG (zero population growth (Zpg), SEQ ID NO: 75), GATCACAGCGAGTTCTTCGG (male sterile (3) K81 (K81), SEQ ID NO: 76), GGAGTTGGGGTCGTCGACAT male sterile (3) K81 (K81), SEQ ID NO: 77), GGCGTCAAGTTCAAGAAGCA (misfire (Mfr), SEQ ID NO: 78), GAGAACGGGACACTGGCAGG (misfire (Mfr), SEQ ID NO: 79), GACTTCTCGTAGGTGCGCAA (sneaky (Snky), SEQ ID NO: 80), or GTAGGTGCGCAATGGTAAGA (sneaky (Snky), SEQ ID NO: 81). Additionally or alternatively, the targeted sequence required for female-specific viability in Aedes aegypti is selected from: AGCGACATGCAGCCATTCTG (double sex (Dsx) 1, SEQ ID NO: 87 in the revised plasmid), CTCACAAGTAGAGCTACACG (Dsx2, SEQ ID NO: 88 in the revised plasmid), GGTAGCTGGCCGTTGCCAAA (Dsx3, SEQ ID NO: 89 in the revised plasmid), CTGTCGTCGTTTTTTTCCGG (Dsx4, SEQ ID NO: 90 in the revised plasmid), GGATATTGGTACGACCCGGG (Dsx5, SEQ ID NO: 91), GCGGGATTCGCTCTCGACGA (Intersex1, SEQ ID NO: 58), GGACAACATTTCCAAGGTTA (Intersex2, SEQ ID NO: 59), GCACTAGTGGGATATCCTGA (labrum (Lab) 5, SEQ ID NO: 60), GTCCAGGAAGCATTTGGTAT (labrum (Lab) 4, SEQ ID NO: 61), GTATTCGATGTTCTCCACC (sister of sex lethal (Slx) 4, SEQ ID NO: 92), GAAGGCATATCAAACATTCG (sister of sex lethal (Slx) 5, SEQ ID NO: 93), GTTAAGAACTCGGCCATCGA (homeotic protein Proboscipedia (Pb) 1, SEQ ID NO: 94), GCAAGTTAAGCCTGAAACAA (homeotic protein Proboscipedia (Pb) 2, SEQ ID NO: 95). In another embodiment, the targeted sequence required for male-specific fertility in Aedes aegypti is selected from: TACTACAACGAGGCTACCGG (Btub1, SEQ ID NO: 96), GTCTCCGCAATACGCCCCGG (Btub2, SEQ ID NO: 97), GATAGGAGCCAAGTTCTGGG (Btub3, SEQ ID NO: 98), CACTATGGATTCGGTCCGAG (Btub4, SEQ ID NO: 99), GTGTAGACTGGCCCTAACGG (zero population growth (Zpg)1, SEQ ID NO: 62), TCTCGTTCCCCAAACACTTG (Zpg2, SEQ ID NO: 63), TCATCAAGAACATGTTCAGG (Zpg3, SEQ ID NO: 64), ACAGTTGGAACCGAACGCTG (Zpg4, SEQ ID NO: 65).

[0014] In another aspect, provided is a mating system producing a genetically modified progeny that is a sterile male insect of Drosophila suzukii. The method comprises a first genetically modified parental insect and a second genetically modified parental insect. In one embodiment, the first genetically modified parental Drosophila suzukii comprises at least one nucleic acid sequence that comprises, or consists essentially of, or yet further consists of: (a) at least a first guide RNA targeting a female essential genomic sequence that is required for female-specific viability in Drosophila suzukii, and (b) at least a second guide RNA targeting a male sterility genomic sequence that is required for male-specific fertility in Drosophila suzukii. In a further embodiment, the second genetically modified parental insect comprises a nucleic acid that encodes an endonuclease under the control of a regulatory sequence that is suitable for directing protein expression in Drosophila suzukii. In some embodiments, the regulatory sequence comprises, or consists essentially of, or yet further consists of a promoter selected from a deadhead (Dhd) promoter or a bicoid (BicC) promoter.

[0015] In yet another aspect, provided is a method of producing a genetically modified progeny that is a sterile male insect of Drosophila suzukii or Aedes aegypti mosquito, the method comprising, or consisting essentially of, or yet further consisting of genetically crossing two parental insects of the mating system as disclosed herein, and producing and collecting the progeny of the parental insects.

[0016] Further provided is a progeny produced by a mating system as disclosed herein, or a method as disclosed herein, along with compositions (such as polynucleotides, vectors, cells, or a Drosophila suzukii or Aedes aegypti mosquito comprising any one or more of the polynucleotides, vectors, cells as disclosed herein) or kits (comprising or consisting essentially of, or yet further consisting of genetically any one or more of the compositions and an optional instruction) for use in a mating system or a method as disclosed herein. In some embodiments, the genetically modified progeny is an egg, a population of eggs, an insect, or a population of insects. In a further embodiment, the progeny is sterile male. Also provided is a method of reducing a wild-type insect population comprising, or consisting essentially of, or yet further consisting of introducing the progeny as disclosed herein to the wild-type insect population.

[0017] In one aspect, provided herein is an isolated polynucleotide Cas9 construct as described herein, its complement or an equivalent of each thereof. In one aspect, the isolated Cas9 construct is of the group of: 874Z, 874S, 874R, 874W, and 874Z1. Further provided herein is a fragment of the isolated Cas9 construct, wherein the fragment encodes a Cas9 polypeptide.

[0018] Vectors as described herein as well as vectors comprising the isolated polynucleotide the isolated Cas9 construct, wherein the fragment encodes a Cas9 polypeptide are further provided.

[0019] Yet further described is an isolated host cell comprising the isolated polynucleotide of as disclosed herein or the vector as disclosed herein, optionally wherein the host cell is an insect cell. In one aspect, the insect is an arthropod, such as a Drosophila, e.g., D. suzukii.

[0020] In another aspect, provided herein is an expression product of the polynucleotide as described herein.

[0021] Also provide is a guide RNA (gRNA) as disclosed herein, or its complement or an equivalent of each thereof. The gRNA is optionally a single guide RNA (sgRNA) or optionally a double guide RNA (dg RNA). The gRNA can be comprised within a vector.

[0022] Further provided are isolated host cells comprising the gRNA as described herein and/or a vector comprising the gRNA, optionally wherein the host cell is an insect cell. In one aspect, the insect is an arthropod, such as a Drosophila, e.g., D. suzukii.

[0023] Further provided is an isolated host cell comprising the isolated polynucleotide of this disclosure and the gRNA of this disclosure, optionally wherein the host cell is an insect cell. In one aspect, the insect is an arthropod, such as a Drosophila, e.g., D. suzukii. In one aspect, the host cell is an egg, a sperm or a zygote.

[0024] Yet further provided herein is a host cell system comprising a first host cell and a second host cell, wherein the first host cell and the second host cell are homozygous, optionally wherein the host cell is an insect cell. In one aspect, the insect is an arthropod, such as a Drosophila, e.g., D. suzukii.

[0025] Also provided is an insect comprising the isolated host cell as described herein. In one aspect, the insect is an arthropod, such as a Drosophila, e.g., D. sukii.

[0026] A mating system is provided, comprising the first host cell as described herein and the second host cell as described herein, wherein the first host cell and the second host cell are homozygous. Progeny produced by the mating system also are provided herein.

[0027] Yet further provide is a CRISPR system comprising:
[0028] (a) a Cas9 polypeptide as described herein, or an equivalent thereof, and
[0029] (b) a recombinant or synthetic guide RNA (gRNA) as described herein, or an equivalent thereof.

[0030] Yet further provided is an isolated host cell comprising this CRISPR system.

[0031] The systems, host cells, polynucleotides and vectors can be used to sterilize or induce lethality of an insect by inserting the cell containing such into the insect. The disclosed methods and compositions are prepared and used in accordance with the methods disclosed in (Kandul et al. 2019), incorporated herein by reference.

[0032] In a further aspect, this document provides methods and materials for producing genetically modified progeny of a sterile male Aedes aegypti mosquito egg.

[0033] In one aspect, a method of producing a genetically modified progeny of a sterile male Aedes aegypti mosquito egg, the method comprises, or consists essentially of, or yet further consists of: (a) introducing at least one nucleic acid sequence into a first Aedes aegypti mosquito, where the at least one nucleic acid sequence including at least a first guide RNA targeting a female essential genomic sequence that is required for female-specific viability; and at least a second guide RNA targeting a male sterility genomic sequence that is required for male-specific fertility; (b) introducing an endonuclease into a second Aedes aegypti mosquito, the second Aedes aegypti mosquito; and (c) genetically crossing the first Aedes aegypti mosquito and the second Aedes aegypti mosquito, wherein genetically crossing the first Aedes aegypti mosquito and the second Aedes aegypti mosquito produces a progeny of sterile male Aedes aegypti mosquito eggs.

[0034] In some embodiments, the female essential genomic sequence comprises, or consists essentially of, or yet further consists of a gene essential for female-specific viability or a female-specific exon essential for female-specific development and/or female-specific viability.

[0035] In some embodiments, the female-essential genomic sequence comprises, or consists essentially of, or yet further consists of transformer 2 (tra-2).

[0036] In some embodiments, the female essential genomic sequence comprises, or consists essentially of, or yet further consists of doublesex (dsx).

[0037] In some embodiments, the at least one first guide RNA comprises, or consists essentially of, or yet further consists of more than one first guide RNA each of which targets a different female-essential genomic sequence that is required for female-specific viability or targets a different region of the same female-essential genomic sequence that is required for female-specific viability.

[0038] In some embodiments, the male sterility genomic sequence comprises, or consists essentially of, or yet further consists of a gene essential for male-specific sterility.

[0039] In some embodiments, the male sterility genomic sequence is selected from a gene comprises, or consists essentially of, or yet further consists of a gene from the group of βTubulin (βTub), fuzzy onions (Fzo), protaimine A (ProtA), or spermatocyte arrest (Sa).

[0040] In some embodiments, the at least one second guide RNA comprises, or consists essentially of, or yet further consists of more than one second guide RNA each of which targets a different male sterility genomic sequence that is required for male fertility or targets a different region of the same male sterility genomic sequence that is required for male specific fertility.

[0041] In some embodiments, the endonuclease comprises, or consists essentially of, or yet further consists of a CRISPR-associated sequence 9 (Cas9) endonuclease or a variant thereof, a CRISPR-associated sequence 13 (Cas13) endonuclease or a variant thereof, a CRISPR from Prevotella and Francisella 1 (Cpf1) endonuclease or a variant thereof, a CRISPR from Microgenomates and Smithella 1 (Cms1) endonuclease or a variant thereof, or a CRISPR-associated sequence 6 (Cash) endonuclease or a variant thereof.

[0042] In some embodiments, the first Aedes aegypti is a female and the second Aedes aegypti is a male.

[0043] In some embodiments, the first Aedes aegypti is a male and the second Aedes aegypti is a female.

[0044] In some embodiments, the introducing step (a) comprises, or consists essentially of, or yet further consists of integrating the at least one nucleic acid into the genome of the first Aedes aegypti mosquito.

[0045] In some embodiments, the genetically crossing step (c) comprises, or consists essentially of, or yet further consists of producing progeny comprising the endonuclease, at least one first guide RNA, and at least one second guide RNA from which male Aedes aegypti mosquito eggs mature to adulthood.

[0046] In some embodiments, the endonuclease is operably linked to a nup50 promoter or a fragment thereof or a uniq promoter or a fragment thereof.

[0047] In another aspect the disclosure provides a progeny of Aedes aegypti mosquito eggs comprising up to 100% sterile male Aedes aegypti mosquito eggs produced by the methods described herein.

[0048] Other features and advantages of the invention will be apparent from the following detailed description, and from the claims.

### BRIEF DESCRIPTION OF FIGURES

[0049] FIGS. 1A to 1B provide a schematic diagram (FIG. 1A) and example images of Drosophila suzukii (FIG. 1B) showing breeding for mass production of sterile Drosophila suzukii males by precision guided sterile insect technique (pgSIT). The CRISPR/Cas9 system provides a way to guide Cas9 endonucleases to a specific gene locus by programming target specificity into a guide RNA (gRNA). The two components required for CRISPR/Cas9-based gene knock-out were split into separate insect lines. Each transgenic line expresses Cas9 or two gRNAs that target gene essential for female viability and male sterility genes. The Cas9 and gRNA lines can be indefinitely propagated in the laboratory. Cas9×gRNA crosses produce both components of the CRISPR/Cas9 system in the same cells and thus cause multiple mutations inside targeted genes resulting in early development knock-outs. Only sterile F1 males will emerge from the eggs. More than 10 lines were engineered targeting one or more female essential and/or male fertility genes. At least two lines demonstrated full penetrance of desired phenotypes (100%, >1,000 embryos).

[0050] FIGS. 2A to 2G provide experimental results vial utilizing various constructs comprising triple gRNAs and Cas9 to be expressed under the promoter of vas, nos or Ubiq.

[0051] FIGS. 3A to 3D provide experimental results vial utilizing triple-gRNA constructs and different Cas9 constructs (FIG. 3A, Nanos Z1; FIG. 3B, Ubiq W; FIG. 3C, W4A; and FIG. 3D, S-Dhd).

[0052] FIG. 4 provides experimental results vial utilizing single-gRNA constructs and a Cas9 to be expressed under the promoter of vas.

[0053] FIG. 5 shows production and distribution of standard genetic control technologies. FIG. 5 shows manual sexing and manual release of adults. Current genetic vector control technologies require production facilities to be in close proximity to release sites. Additionally, due to current sxing techniques only adults can be released. The disclosed technology can be developed in one centralized facility and then distributed globally in any life stage (eggs, larvae, pupae, adults), because the females are eliminated early in embryonic development. This flexibility could allow novel filed distribution methods to remote sites (e.g., egg distribution by drone).

[0054] FIG. 6 is a schematic diagram showing breeding for mass production of sterile mosquito males by precision guided sterile insect technique (pgSIT). The CRISPR/Cas9 system provides a way to guide Cas9 endonucleases to a specific gene locus by programming target specificity into a guide RNA (gRNA). The two components required for CRISPR/Cas9-based gene knock-out were split into separate insect lines. Each transgenic line expresses Cas9 or two gRNAs that target gene essential for female viability and male sterility genes. The Cas9 and gRNA lines can be indefinitely propagated in the laboratory. Cas9×gRNA crosses produce both components of the CRISPR/Cas9 system in the same cells and thus cause multiple mutations inside targeted genes resulting in early development knock-outs. Only sterile F1 males will emerge from the eggs.

[0055] FIG. 7 shows generation of double and triple mutant mosquitos. Single injections of multiplexed sgRNAs robustly generate double- and triple-mutant mosquitoes. Larva, pupae, and adult G1 phenotypes for double-mutants, including: yellow body and white eyes (yellow/white), a mixture of yellow and dark body (yellow/ebony), dark body and white eyes (ebony/white), and one triple-mutant, which is a phenotypic mixture of yellow and dark body and white eyes (yellow/ebony/white). The striking differences between wild-type and mutant larva, pupae and adult are highlighted. (Magnifications: whole-body images, 20×; Insets, 100×.) See, Li et al. (2017) PNAS.

[0056] FIGS. 8A and 8B show a schematic diagram of scalability for workflow (FIG. 8A) and workflow (FIG. 8B). FIG. 8A shows small scale manual egg production is the current procedure for mass production in most genetic control programs. FIG. 8B shows automated sex sorting procedures that incorporates the methods and compositions described herein.

[0057] FIGS. 9A to 9D provide a Cas9 construct referred herein to as vector 874Z, expressing Cas9 under a promoter of Vasa (i.e., Vasa-Cas9). In one embodiment, vector 874Z refers to pBac-vasa-Cas9-2a-eGFP-p10-UTR-Opie2-dsRed-Modified having a sequence of SEQ ID NO: 1. Its plasmid map is shown in FIG. 9A, while FIG. 9B lists features of the plasmid and the corresponding locations (i.e., starting nt and ending nt in the plasmid). In another embodiment, vector 874Z refers to pBac-vasa-Cas9-2a-eGFP-p10-UTR-Opie2-dsRed having a sequence of SEQ ID NO: 2. Its plasmid map is shown in FIG. 9C, while FIG. 9D lists features of the plasmid and the corresponding locations (i.e., starting nt and ending nt in the plasmid).

[0058] FIGS. 10A to 10B provide a Cas9 construct referred herein to as vector 874S, expressing Cas9 under a promoter of Dhd (i.e., Dhd-Cas9). In one embodiment, vector 874S refers to pBac-dmeDhd-Cas9-2a-eGFP-p10-UTR-Opie2-dsRed having a sequence of SEQ ID NO: 3. Its plasmid map is shown in FIG. 10A, while FIG. 10B lists features of the plasmid and the corresponding locations (i.e., starting nt and ending nt in the plasmid).

[0059] FIGS. 11A to 11B provide a Cas9 construct referred herein to as vector 874R, expressing Cas9 under a promoter of BicC (i.e., BicC-Cas9). In one embodiment, vector 874R refers to pBac-dmeBicC-Cas9-2a-eGFP-p10-UTR-Opie2-dsRed having a sequence of SEQ ID NO: 4. Its plasmid map is shown in FIG. 11A, while FIG. 11B lists features of the plasmid and the corresponding locations (i.e., starting nt and ending nt in the plasmid).

[0060] FIGS. 12A to 12B provide a Cas9 construct referred herein to as vector 874W, expressing Cas9 under a promoter of Ubiq (i.e., Ubiq-Cas9). In one embodiment, vector 874W refers to pBac-dmeUbiq-Cas9-2a-eGFP-p10-UTR-Opie2-dsRed having a sequence of SEQ ID NO: 5. Its plasmid map is shown in FIG. 12A, while FIG. 12B lists features of the plasmid and the corresponding locations (i.e., starting nt and ending nt in the plasmid).

[0061] FIGS. 13A to 13D provide a Cas9 construct referred herein to as vector 874Z1, expressing Cas9 under a promoter of Nanos (i.e., Nanos-Cas9). In one embodiment, vector 874Z1 refers to pBac-dmeNanos-Cas9-2a-eGFP-p10-UTR-Opie2-dsRed-Modified (i.e., pBac-nanos-Cas9-2a-eGFP-p10-UTR-Opie2-dsRed-Modified) having a sequence of SEQ ID NO: 6. Its plasmid map is shown in FIG. 13A, while FIG. 13B lists features of the plasmid and the corresponding locations (i.e., starting nt and ending nt in the plasmid). In another embodiment, vector 874Z1 refers to pBac-dmeNanos-Cas9-2a-eGFP-p10-UTR-Opie2-dsRed (i.e., pBac-nanos-Cas9-2a-eGFP-p10-UTR-Opie2-dsRed) having a sequence of SEQ ID NO: 7. Its plasmid map is shown in FIG. 13C, while FIG. 13D lists features of the plasmid and the corresponding locations (i.e., starting nt and ending nt in the plasmid).

[0062] FIGS. 14A to 14C provide a gRNA construct herein to as vector 1056C.2, comprising or expressing two sxl gRNAs. In one embodiment, vector 1056C.2 refers to pBac-Ds-HL-U63-sxln-gRNA-U63UTR-opie-mVenus-SV40-U63-sxlm-gRNA-U63UT-HR or HL-U6:3-sxl2-gRNA-UTR-opie-mVenus-SV40-U6:3-sxl1-gRNA-UTR-HR having a sequence of SEQ ID NO: 8. Its plasmid map is shown in FIG. 14A, while FIGS. 14B and 14C list features of the plasmid and the corresponding locations (i.e., starting nt and ending nt in the plasmid).

[0063] FIGS. 15A to 15C provide a gRNA construct herein to as vector 1056H, comprising or expressing two sxl gRNAs and one btub gRNA. In one embodiment, vector 1056H refers to pBac-Ds-HL-U63-sxln-gRNA-U63UTR-opie-mVenus-SV40-U63-sxlm-gRNA-U63UT-HR-U63-Btub1-UTR or HL-U6:3-sxl2-gRNA-UTR-opie-mVenus-SV40-U6:3-sxl1-gRNA-UTR-HR-U6-Btuborig2-UTR having a sequence of SEQ ID NO: 9. Its plasmid map is shown in FIG. 15A, while FIGS. 15B and 15C list features of the plasmid and the corresponding locations (i.e., starting nt and ending nt in the plasmid).

[0064] FIGS. 16A to 16C provide a gRNA construct herein to as vector 1056I, comprising or expressing two sxl gRNAs and one btub gRNA. In one embodiment, vector 1056I refers to pBac-Ds-HL-U63-sxln-gRNA-U63UTR-opie-mVenus-SV40-U63-sxlm-gRNA-U63UT-HR-U63-Btub2-UTR or HL-U6:3-sxl2-gRNA-UTR-opie-mVenus-SV40-U6:3-sxl1-gRNA-UTR-HR-U6-Btub2-UTR having a sequence of SEQ ID NO: 10. Its plasmid map is shown in FIG. 16A, while FIGS. 16B and 16C list features of the plasmid and the corresponding locations (i.e., starting nt and ending nt in the plasmid).

[0065] FIGS. 17A to 17C provide a gRNA construct herein to as vector 1056J, comprising or expressing two sxl gRNAs and one btub gRNA. In one embodiment, vector 1056J refers to pBac-Ds-HL-U63-sxln-gRNA-U63UTR-opie-mVenus-SV40-U63-sxlm-gRNA-U63UT-HR-U63-Btub3-UTR or HL-U6:3-sxl2-gRNA-UTR-opie-mVenus-SV40-U6:3-sxl1-gRNA-UTR-HR-U6-Btub3-UTR having a sequence of SEQ ID NO: 11. Its plasmid map is shown in FIG. 17A, while FIGS. 17B and 17C list features of the plasmid and the corresponding locations (i.e., starting nt and ending nt in the plasmid).

[0066] FIGS. 18A to 18C provide a gRNA construct herein to as vector 1056K, comprising or expressing two sxl gRNAs and one btub gRNA. In one embodiment, vector 1056K refers to pBac-Ds-HL-U63-sxln-gRNA-U63UTR-opie-mVenus-SV40-U63-sxlm-gRNA-U63UT-HR-U63-Btub1-UTR or HL-U6:3-sxl2-gRNA-UTR-opie-mVenus-SV40-U6:3-sxl1-gRNA-UTR-HR-U6-Btub4-UTR having a sequence of SEQ ID NO: 12. Its plasmid map is shown in FIG. 18A, while FIGS. 18B and 18C list features of the plasmid and the corresponding locations (i.e., starting nt and ending nt in the plasmid).

[0067] FIGS. 19A to 19C provide a gRNA construct herein to as vector 1104D, comprising or expressing an sxl gRNA and two Cannonball gRNAs. In one embodiment, vector 1104D refers to pBac-[U6-gRNA-Slx]-[U6-gRNA #2]-[Opie2-eGFP-p10]-[U6-gRNA #1-Can] or pBac-[U6-gRNA-Slx]-[U6-gRNA #2]-[Opie2-eGFP-p10]-[U6-gRNA #1-Can] having a sequence of SEQ ID NO: 13. Its plasmid map is shown in FIG. 19A, while FIGS. 19B and 19C list features of the plasmid and the corresponding locations (i.e., starting nt and ending nt in the plasmid). FIG. 19C further provides an amino acid sequence of the encoded eGFP (SEQ ID NO: 14).

[0068] FIGS. 20A to 20C provide a gRNA construct herein to as vector 1104E, comprising or expressing one sxl gRNA and two Mia gRNAs. In one embodiment, vector 1104E refers to pBac-[U6-gRNA-Slx]-[U6-gRNA-Mia #1]-[Opie2-eGFP-p10]-[U6-gRNA-Mia #2] having a sequence of SEQ ID NO: 15. Its plasmid map is shown in FIG. 20A, while FIGS. 20B and 20C list features of the plasmid and the corresponding locations (i.e., starting nt and ending nt in the plasmid). FIG. 20C further provides an amino acid sequence of the encoded eGFP (SEQ ID NO: 14).

[0069] FIGS. 21A to 21C provide a gRNA construct herein to as vector 1104J, comprising or expressing an sxl gRNA and two Zpg gRNAs. In one embodiment, vector 1104J refers to pBac-[U6-gRNA-Slx]-[U6-gRNA-Zpg #1]-[Opie2-eGFP-p10]-[U6-gRNA-Zpg #2] having a sequence of SEQ ID NO: 16. Its plasmid map is shown in FIG. 21A, while FIGS. 21B and 21C list features of the plasmid and the corresponding locations (i.e., starting nt and ending nt in the plasmid). FIG. 21C further provides an amino acid sequence of the encoded eGFP (SEQ ID NO: 14).

[0070] FIGS. 22A to 22C provide a gRNA construct herein to as vector 1104H, comprising or expressing an sxl gRNA and two PIWI gRNAs. In one embodiment, vector 1104H refers to pBac-[U6-gRNA-Slx]-[U6-gRNA-PIWI #1]-[Opie2-eGFP-p10]-[U6-gRNA-PIWI #2] having a sequence of SEQ ID NO: 17. Its plasmid map is shown in FIG. 22A, while FIGS. 22B and 22C list features of the plasmid and the corresponding locations (i.e., starting nt and ending nt in the plasmid). FIG. 22C further provides an amino acid sequence of the encoded eGFP (SEQ ID NO: 14).

[0071] FIGS. 23A to 23C provide a gRNA construct herein to as vector 1104I, comprising or expressing an sxl gRNA and two HP1e gRNAs. In one embodiment, vector 1104I refers to pBac-[U6-gRNA-Slx]-[U6-gRNA-HP1e #1]-[Opie2-eGFP-p10]-[U6-gRNA-HP1e #2] having a sequence of SEQ ID NO: 18. Its plasmid map is shown in FIG. 23A, while FIGS. 23B and 23C list features of the plasmid and the corresponding locations (i.e., starting nt and ending nt in the plasmid). FIG. 23C further provides an amino acid sequence of the encoded eGFP (SEQ ID NO: 14).

[0072] FIGS. 24A to 24C provide a gRNA construct herein to as vector 1104K, comprising or expressing an sxl gRNA and two K81 gRNAs. In one embodiment, vector 1104K refers to pBac-[U6-gRNA-Slx]-[U6-gRNA-K81 #1]-[Opie2-eGFP-p10]-[U6-gRNA-K81 #2] having a sequence of SEQ ID NO: 19. Its plasmid map is shown in FIG. 24A, while FIGS. 24B and 24C list features of the plasmid and the corresponding locations (i.e., starting nt and ending nt in the plasmid). FIG. 24C further provides an amino acid sequence of the encoded eGFP (SEQ ID NO: 14).

[0073] FIGS. 25A to 25C provide a gRNA construct herein to as vector 1104M, comprising or expressing an sxl gRNA and two Mfr gRNAs. In one embodiment, vector 1104M refers to pBac-[U6-gRNA-Slx]-[U6-gRNA-Mfr #1]-[Opie2-eGFP-p10]-[U6-gRNA-Mfr #2] having a sequence of SEQ ID NO: 20. Its plasmid map is shown in FIG. 25A, while FIGS. 25B and 25C list features of the plasmid and the corresponding locations (i.e., starting nt and ending nt in the plasmid). FIG. 25C further provides an amino acid sequence of the encoded eGFP (SEQ ID NO: 14).

[0074] FIGS. 26A to 26C provide a gRNA construct herein to as vector 1104N, comprising or expressing an sxl gRNA and two Snky gRNAs. In one embodiment, vector 1104N refers to pBac-[U6-gRNA-Slx]-[U6-gRNA-Snky #1]-[Opie2-eGFP-p10]-[U6-gRNA-Snky #2] having a sequence of SEQ ID NO: 21. Its plasmid map is shown in FIG. 26A, while FIGS. 26B and 26C list features of the plasmid and the corresponding locations (i.e., starting nt and ending nt in the plasmid). FIG. 26C further provides an amino acid sequence of the encoded eGFP (SEQ ID NO: 14).

[0075] FIGS. 27A to 27B provide a Cas9 construct referred herein to as vector 874L, expressing Cas9 under a promoter of Exuperentia (i.e., Exuperentia-cas9). In one embodiment, vector 874L refers to pBac-AAEL010097-Cas9-2a-eGFP-p10-UTR-Opie2-dsRed having a sequence of SEQ ID NO: 22. Its plasmid map is shown in FIG. 27A, while FIG. 27B lists features of the plasmid and the corresponding locations (i.e., starting nt and ending nt in the plasmid).

[0076] FIGS. 28A to 28B provide a Cas9 construct referred herein to as vector 874M, expressing Cas9 under a promoter of 4-nitrophenylphosphatase (i.e., 4-nitrophenylphosphatase-cas9). In one embodiment, vector 874M refers to pBac-AAEL007097-Cas9-2a-eGFP-p10-UTR-Opie2-dsRed having a sequence of SEQ ID NO: 23. Its plasmid map is shown in FIG. 28A, while FIG. 28B lists features of the plasmid and the corresponding locations (i.e., starting nt and ending nt in the plasmid).

[0077] FIGS. 29A to 29B provide a Cas9 construct referred herein to as vector 874N, expressing Cas9 under a promoter of Trunk (i.e., Trunk-cas9). In one embodiment, vector 874N refers to pBac-AAEL007584-Cas9-2a-eGFP-p10-UTR-Opie2-dsRed having a sequence of SEQ ID NO: 24. Its plasmid map is shown in FIG. 29A, while FIG. 29B lists features of the plasmid and the corresponding locations (i.e., starting nt and ending nt in the plasmid).

[0078] FIGS. 30A to 30B provide a Cas9 construct referred herein to as vector 874P, expressing Cas9 under a promoter of Nup50 (i.e., Nup50-cas9). In one embodiment, vector 874P refers to pBac-AAEL005635-Cas9-2a-eGFP-p10-UTR-Opie2-dsRed having a sequence of SEQ ID NO: 25. Its plasmid map is shown in FIG. 30A, while FIG. 30B lists features of the plasmid and the corresponding locations (i.e., starting nt and ending nt in the plasmid).

[0079] FIGS. 31A to 31B provide a Cas9 construct referred herein to as vector 874X, expressing Cas9 under a promoter of Polyubiquitin (i.e., Polyubiquitin-cas9). In one embodiment, vector 874X refers to pBac-Aedes-Ubiq-Cas9-2a-eGFP-p10-UTR-Opie2-dsRed having a sequence of SEQ ID NO: 26. Its plasmid map is shown in FIG. 31A, while FIG. 31B lists features of the plasmid and the corresponding locations (i.e., starting nt and ending nt in the plasmid).

[0080] FIGS. 32A to 32B provide a Cas9 construct referred herein to as vector 874Y, expressing Cas9 under a promoter of Ubiquitin L40 (i.e., Ubiquitin L40-cas9). In one embodiment, vector 874Y refers to pBac-Aedes-Ubiq (AAEL006511)-Cas9-2a-eGFP-p10-UTR-Opie2-dsRed having a sequence of SEQ ID NO: 27. Its plasmid map is shown in FIG. 32A, while FIG. 32B lists features of the plasmid and the corresponding locations (i.e., starting nt and ending nt in the plasmid).

[0081] FIGS. 33A to 33B provide a Cas9 construct referred herein to as vector 874Y3, expressing Cas9 under a promoter of Vasa (i.e., Vasa-cas9). In one embodiment, vector 874Y3 refers to pBac-Aedes-Vasa(AAEL004978)-Cas9-2a-eGFP-p10-UTR-Opie2-dsRed having a sequence of SEQ ID NO: 28. Its plasmid map is shown in FIG. 33A, while FIG. 33B lists features of the plasmid and the corresponding locations (i.e., starting nt and ending nt in the plasmid).

[0082] FIGS. 34A to 34C provide a gRNA construct herein to as vector 1055A, comprising or expressing two β-tubulin gRNAs. In one embodiment, vector 1055A refers to pBac-U6(AAEL017774)-sgBTub1-LongScaffold-3 UTR-U6(AAEL017763)-sgBTub2-LongScaffold-3 UTR-3xp3-tdTomato-v3 having a sequence of SEQ ID NO: 29. Its plasmid map is shown in FIG. 34A, while FIGS. 34B and 34C list features of the plasmid and the corresponding locations (i.e., starting nt and ending nt in the plasmid).

[0083] FIGS. 35A to 35C provide a gRNA construct herein to as vector 1055B, comprising or expressing two β-tubulin gRNAs. In one embodiment, vector 1055B refers to pBac-U6(AAEL017774)-sgBTub3-LongScaffold-3 UTR-U6(AAEL017763)-sgBTub4-LongScaffold-3 UTR-3xp3-tdTomato-v3 having a sequence of SEQ ID NO: 30. Its plasmid map is shown in FIG. 35A, while FIGS. 35B and 35C list features of the plasmid and the corresponding locations (i.e., starting nt and ending nt in the plasmid).

[0084] FIGS. 36A to 36C provide a gRNA construct herein to as vector 1055C, comprising or expressing two Double sex gRNAs. In one embodiment, vector 1055C refers to pBac-U6(AAEL017774)-sgDsx1-LongScaffold-3 UTR-U6(AAEL017763)-sgDsx2-LongScaffold-3 UTR-3xp3-tdTomato-v3-Revised having a sequence of SEQ ID NO: 31. Its plasmid map is shown in FIG. 36A, while FIGS. 36B and 36C list features of the plasmid and the corresponding locations (i.e., starting nt and ending nt in the plasmid).

[0085] FIGS. 37A to 37C provide a gRNA construct herein to as vector 1055D, comprising or expressing two Double sex gRNAs. In one embodiment, vector 1055D refers to pBac-U6(AAEL017774)-sgDsx3-LongScaffold-3 UTR-U6(AAEL017763)-sgDsx4-LongScaffold-3 UTR-3xp3-tdTomato-v3-Revised having a sequence of SEQ ID NO: 32. Its plasmid map is shown in FIG. 37A, while FIGS. 37B and 37C list features of the plasmid and the corresponding locations (i.e., starting nt and ending nt in the plasmid).

[0086] FIGS. 38A to 38C provide a gRNA construct herein to as vector 1055E, comprising or expressing two Zpg gRNAs. In one embodiment, vector 1055E refers to pBac-U6(AAEL017774)-sgZpg1-LongScaffold-3 UTR-U6(AAEL017763)-sgZpg2-LongScaffold-3 UTR-3xp3-tdTomato-v3 having a sequence of SEQ ID NO: 33. Its plasmid map is shown in FIG. 38A, while FIGS. 38B and 38C list features of the plasmid and the corresponding locations (i.e., starting nt and ending nt in the plasmid).

[0087] FIGS. 39A to 39C provide a gRNA construct herein to as vector 1055F, comprising or expressing two Zpg gRNAs. In one embodiment, vector 1055F refers to pBac-U6(AAEL017774)-sgZpg3-LongScaffold-3 UTR-U6(AAEL017763)-sgZpg4-LongScaffold-3 UTR-3xp3-tdTomato-v3 having a sequence of SEQ ID NO: 34. Its plasmid map is shown in FIG. 39A, while FIGS. 39B and 39C list features of the plasmid and the corresponding locations (i.e., starting nt and ending nt in the plasmid).

[0088] FIGS. 40A to 40C provide a gRNA construct herein to as vector 1055J, comprising or expressing two Intersex gRNAs. In one embodiment, vector 1055J refers to pBac-U6(AAEL017774)-gRNA=In #1-LongScaffold-3 UTR-U6(AAEL017763)-gRNA=In #2-LongScaffold-3 UTR-3xp3-tdTomato-v3 having a sequence of SEQ ID NO: 35. Its plasmid map is shown in FIG. 40A, while FIGS. 40B and 40C list features of the plasmid and the corresponding locations (i.e., starting nt and ending nt in the plasmid).

[0089] FIGS. 41A to 41B provide a gRNA construct herein to as vector 1055Y, comprising or expressing two Labrum gRNAs. In one embodiment, vector 1055Y refers to pBac-U6(AAEL017774)-sgLab5-U6(AAEL017763)-sgLab4-LongScaffold-3 UTR-3xp3-tdTomato having a sequence of SEQ ID NO: 36. Its plasmid map is shown in FIG. 41A, while FIG. 41B lists features of the plasmid and the corresponding locations (i.e., starting nt and ending nt in the plasmid).

[0090] FIGS. 42A to 42B provide a gRNA construct herein to as vector 1055Z, comprising or expressing two Sister of sex lethal gRNAs. In one embodiment, vector 1055Z refers to pBac-U6(AAEL017774)-sgSlx4-U6(AAEL017763)-sgSlx5-LongScaffold-3 UTR-3xp3-tdTomato having a sequence of SEQ ID NO: 37. Its plasmid map is shown in FIG. 42A, while FIG. 42B lists features of the plasmid and the corresponding locations (i.e., starting nt and ending nt in the plasmid).

[0091] FIGS. 43A to 43B provide a gRNA construct herein to as vector 1055T, comprising or expressing two Proboscipedia gRNAs. In one embodiment, vector 1055T refers to pBac-U6(AAEL017774)-sgPb1-LongScaffold-3 UTR-U6(AAEL017763)-sgPb2-LongScaffold-3 UTR-3xp3-tdTomato having a sequence of SEQ ID NO: 38. Its plasmid map is shown in FIG. 43A, while FIG. 43B lists features of the plasmid and the corresponding locations (i.e., starting nt and ending nt in the plasmid).

[0092] FIGS. 44A to 44C provide a gRNA construct herein to as vector 1067A, comprising or expressing four gRNAs (targeting β-tubulin). In one embodiment, vector 1067A refers to pBac-U6(AAEL017774)-sgBTub1-U6(AAEL017763)-sgBTub2-U6(AAEL017774)-sgBTub3-U6(AAEL017763)-sgBTub4-LongScaffold-3 UTR-3xp3-tdTomato-v3 having a sequence of SEQ ID NO: 39. Its plasmid map is shown in FIG. 44A, while FIGS. 44B and 44C list features of the plasmid and the corresponding locations (i.e., starting nt and ending nt in the plasmid).

[0093] FIGS. 45A to 45C provide a gRNA construct herein to as vector 1067B, comprising or expressing four gRNAs (targeting Double sex). In one embodiment, vector 1067B refers to pBac-U6(AAEL017774)-sgDsx1-U6(AAEL017763)-sgDsx2-U6(AAEL017774)-sgDsx3-U6(AAEL017763)-sgDsx4-LongScaffold-3 UTR-3xp3-tdTomato-v3 having a sequence of SEQ ID NO: 40. Its plasmid map is shown in FIG. 45A, while FIGS. 45B and 45C list features of the plasmid and the corresponding locations (i.e., starting nt and ending nt in the plasmid).

[0094] FIGS. 46A to 46C provide a gRNA construct herein to as vector 1067C, comprising or expressing four gRNAs (targeting Zpg). In one embodiment, vector 1067C refers to pBac-U6(AAEL017774)-sgZpg1-U6(AAEL017763)-sgZpg2-U6(AAEL017774)-sgZpg3-U6(AAEL017763)-sgZpg4-LongScaffold-3 UTR-3xp3-tdTomato-v3 having a sequence of SEQ ID NO: 41. Its plasmid map is shown in FIG. 46A, while FIGS. 46B and 46C list features of the plasmid and the corresponding locations (i.e., starting nt and ending nt in the plasmid).

[0095] FIGS. 47A to 47C provide a gRNA construct herein to as vector 1067D, comprising or expressing four gRNAs (targeting Dsx, Isx and βtub). In one embodiment, vector 1067D refers to pBac-U6(AAEL017774)-sgDsx1-U6(AAEL017774)-sgIsx1-U6(AAEL017774)-sgBTub3-U6(AAEL017763)-sgBTub2-LongScaffold-3 UTR-3xp3-tdTomato having a sequence of SEQ ID NO: 42. Its plasmid map is shown in FIG. 47A, while FIGS. 47B and 47C list features of the plasmid and the corresponding locations (i.e., starting nt and ending nt in the plasmid).

[0096] FIGS. 48A to 48C provide a gRNA construct herein to as vector 1067E, comprising or expressing four gRNAs (targeting Dsx and βtub). In one embodiment, vector 1067E refers to pBac-U6(AAEL017774)-sgDsx1-U6(AAEL017774)-sgDsx5-U6(AAEL017774)-sgBTub3-U6(AAEL017763)-sgBTub2-LongScaffold-3 UTR-3xp3-tdTomato having a sequence of SEQ ID NO: 43. Its plasmid map is shown in FIG. 48A, while FIGS. 48B and 48C list features of the plasmid and the corresponding locations (i.e., starting nt and ending nt in the plasmid).

[0097] FIGS. 49A to 49C provide a gRNA construct herein to as vector 1067F, comprising or expressing four gRNAs (targeting Dsx and βtub). In one embodiment, vector 1067F refers to pBac-U6(AAEL017774)-sgBTub3-U6(AAEL017763)-sgBTub2-LongScaffold-3 UTR-3xp3-tdTomato-U6(AAEL017774)-sgDsx1-U6(AAEL017763)-sgDsx1 having a sequence of SEQ ID NO: 44. Its plasmid map is shown in FIG. 49A, while FIGS. 49B and 49C list features of the plasmid and the corresponding locations (i.e., starting nt and ending nt in the plasmid).

[0098] FIGS. 50A to 50C provide a gRNA construct herein to as vector 1067G, comprising or expressing four gRNAs (targeting Dsx and Zpg). In one embodiment, vector 1067G refers to pBac-U6(AAEL017774)-sgZpg3-U6(AAEL017763)-sgZpg4-LongScaffold-3 UTR-3xp3-tdTomato-U6(AAEL017774)-sgDsx1-U6(AAEL017763)-sgDsx1 having a sequence of SEQ ID NO: 45. Its plasmid map is shown in FIG. 50A, while FIGS. 50B and 50C list features of the plasmid and the corresponding locations (i.e., starting nt and ending nt in the plasmid).

[0099] FIGS. 51A to 51C provide a gRNA construct herein to as vector 1067H, comprising or expressing six gRNAs (targeting Dsx and βtub). In one embodiment, vector 1067H refers to pBac-U6(AAEL017774)-sgDsx1-U6(AAEL017763)-sgDsx2-U6(AAEL017774)-sgDsx3-U6(AAEL017763)-sgDsx4-LongScaffold-3 UTR-3xp3-tdTomato-v3-U6(AAEL017774)-sgBTub3-U6(AAEL017763)-sgBTub2 having a sequence of SEQ ID NO: 46. Its plasmid map is shown in FIG. 51A, while FIGS. 51B and 51C list features of the plasmid and the corresponding locations (i.e., starting nt and ending nt in the plasmid).

[0100] FIGS. 52A to 52C provide a gRNA construct herein to as vector 1067L, comprising or expressing six gRNAs (targeting Dsx, Isx and βtub). In one embodiment, vector 1067L refers to pBac-pBac-U6(AAEL017774)-sgDsx1-U6(AAEL017774)-sgIsx1-U6(AAEL017774)-sgBTub3-U6(AAEL017763)-sgBTub2-LongScaffold-3 UTR-3xp3-tdTomato-v3-U6(AAEL017774)-sgDsx2-U6(AAEL017763)-sgDsx4 having a sequence of SEQ ID NO: 47. Its plasmid map is shown in FIG. 52A, while FIGS. 52B and 52C list features of the plasmid and the corresponding locations (i.e., starting nt and ending nt in the plasmid).

[0101] FIG. 53 provides illustrations of vectors 874L, 874M, 874N and 874P. Ovaries should express GFP. Body should be dsRed. There is no need for Cas9 protein/RNA/Helper plasmid co-Injection. Higher Rates of Cas9 mediated cleavage were detected.

[0102] FIG. 54 provides model-predicted impact of releases of pgSIT eggs on Aedes aegypti mosquito population density with comparison to releases of Wolbachia-based incompatible insect technique (IIT), release of insects carrying a dominant lethal gene (MDL), and female-specific MDL (fsRIDL). Releases are carried out weekly over a 6-month period with release ratios (relative to wild adults) shown in the key. Model predictions were computed using 2000 realizations of the stochastic implementation of the MGDrivE simulation framework (Sanchez et al. 2018) for a randomly mixing Ae. aegypti population of 10,000 adult females and model parameters described in Supplemental Table 10 of Kandul et al. 2019. Previous results suggested that pgSIT releases outcompete those of other suppression technologies when pgSIT mating competitiveness is estimated from lab experiments for Drosophila melanogaster (top line). However, pgSIT and fsRIDL perform similarly well when mating competitiveness is estimated from field releases of MDL strains of Aedes aegypti.

### DETAILED DESCRIPTION

[0103] Unless defined otherwise, all technical and scientific terms used herein have the same meanings as commonly understood by one of ordinary skill in the art to which this invention belongs. All nucleotide sequences provided herein are presented in the 5′ to 3′ direction. Although any methods and materials similar or equivalent to those described herein can be used in the practice or testing of the present invention, the preferred methods, devices, and materials are now described. All technical and patent publications cited herein are incorporated herein by reference in their entirety. Nothing herein is to be construed as an admission that the invention is not entitled to antedate such disclosure by virtue of prior invention.

[0104] The practice of the present technology will employ, unless otherwise indicated, conventional techniques of tissue culture, immunology, molecular biology, microbiology, cell biology, and recombinant DNA, which are within the skill of the art. See, e.g., Green and Sambrook eds. (2012) Molecular Cloning: A Laboratory Manual, 4th edition; the series Ausubel et al. eds. (2015) Current Protocols in Molecular Biology; the series Methods in Enzymology (Academic Press, Inc., N.Y.); MacPherson et al. (2015) PCR 1: A Practical Approach (IRL Press at Oxford University Press); MacPherson et al. (1995) PCR 2: A Practical Approach; McPherson et al. (2006) PCR: The Basics (Garland Science); Harlow and Lane eds. (1999) Antibodies, A Laboratory Manual; Greenfield ed. (2014) Antibodies, A Laboratory Manual; Freshney (2010) Culture of Animal Cells: A Manual of Basic Technique, 6th edition; Gait ed. (1984) Oligonucleotide Synthesis; U.S. Pat. No. 4,683,195; Hames and Higgins eds. (1984) Nucleic Acid Hybridization; Anderson (1999) Nucleic Acid Hybridization; Herdewijn ed. (2005) Oligonucleotide Synthesis: Methods and Applications; Hames and Higgins eds. (1984) Transcription and Translation; Buzdin and Lukyanov ed. (2007) Nucleic Acids Hybridization: Modern Applications; Immobilized Cells and Enzymes (IRL Press (1986)); Grandi ed. (2007) In Vitro Transcription and Translation Protocols, 2nd edition; Guisan ed. (2006) Immobilization of Enzymes and Cells; Perbal (1988) A Practical Guide to Molecular Cloning, 2nd edition; Miller and Calos eds, (1987) Gene Transfer Vectors for Mammalian Cells (Cold Spring Harbor Laboratory); Makrides ed. (2003) Gene Transfer and Expression in Mammalian Cells; Mayer and Walker eds. (1987) Immunochemical Methods in Cell and Molecular Biology (Academic Press, London); Lundblad and Macdonald eds. (2010) Handbook of Biochemistry and Molecular Biology, 4th edition; Herzenberg et al. eds (1996) Weir's Handbook of Experimental Immunology, 5th edition; and/or more recent editions thereof.

[0105] The terminology used in the description herein is for the purpose of describing particular embodiments only and is not intended to be limiting of the invention. All publications, patent applications, patents and other references mentioned herein are incorporated by reference in their entirety.

[0106] All numerical designations, e.g., pH, temperature, time, concentration, and molecular weight, including ranges, are approximations which are varied (+) or (−) by increments of 1.0 or 0.1, as appropriate or alternatively by a variation of +/−15%, or alternatively 10% or alternatively 5% or alternatively 2%. It is to be understood, although not always explicitly stated, that all numerical designations are preceded by the term “about”. It also is to be understood, although not always explicitly stated, that the reagents described herein are merely exemplary and that equivalents of such are known in the art.

[0107] Unless the context indicates otherwise, it is specifically intended that the various features of the invention described herein can be used in any combination. Moreover, the disclosure also contemplates that in some embodiments, any feature or combination of features set forth herein can be excluded or omitted. To illustrate, if the specification states that a complex comprises components A, B and C, it is specifically intended that any of A, B or C, or a combination thereof, can be omitted and disclaimed singularly or in any combination.

[0108] Unless explicitly indicated otherwise, all specified embodiments, features, and terms intend to include the recited embodiment, feature, or term and biological equivalents thereof.

### Definitions

[0109] As used in the specification and claims, the singular form “a”, “an” and “the” include plural references unless the context clearly dictates otherwise. For example, the term “a polypeptide” includes a plurality of polypeptides, including mixtures thereof.

[0110] The term “about,” as used herein when referring to a measurable value such as an amount or concentration and the like, is meant to encompass variations of 20%, 10%, 5%, 1%, 0.5%, or even 0.1% of the specified amount.

[0111] As used herein, the term “comprising” is intended to mean that the compositions and methods include the recited elements, but do not exclude others. “Consisting essentially of” when used to define compositions and methods, shall mean excluding other elements of any essential significance to the combination for the intended use. Thus, a composition consisting essentially of the elements as defined herein would not exclude trace contaminants from the isolation and purification method and pharmaceutically acceptable carriers, such as phosphate buffered saline, preservatives, and the like. “Consisting of” shall mean excluding more than trace elements of other ingredients and substantial method steps for administering the compositions of this invention. Embodiments defined by each of these transition terms are within the scope of this invention.

[0112] The term “protein,” “peptide,” and “polypeptide” are used interchangeably and in their broadest sense to refer to a compound of two or more subunit amino acids, amino acid analogs or peptidomimetics. The subunits may be linked by peptide bonds. In another embodiment, the subunit may be linked by other bonds, e.g., ester, ether, etc. A protein or peptide must contain at least two amino acids and no limitation is placed on the maximum number of amino acids that can comprise a protein's or peptide's sequence. As used herein the term “amino acid” refers to natural and/or unnatural or synthetic amino acids, including glycine and both the D and L optical isomers, amino acid analogs and peptidomimetics.

[0113] As used herein, the term “fusion protein” refers to a protein comprised of domains from more than one naturally occurring or recombinantly produced protein, where generally each domain serves a different function. In this regard, the term “linker” refers to a protein fragment that is used to link these domains together—optionally to preserve the conformation of the fused protein domains and/or prevent unfavorable interactions between the fused protein domains that can compromise their respective functions.

[0114] The terms “polynucleotide” and “oligonucleotide” are used interchangeably and refer to a polymeric form of nucleotides of any length, either deoxyribonucleotides or ribonucleotides or analogs thereof. Polynucleotides can have any three-dimensional structure and may perform any function, known or unknown. The following are non-limiting examples of polynucleotides: a gene or gene fragment (for example, a probe, primer, EST or SAGE tag), exons, introns, messenger RNA (mRNA), transfer RNA, ribosomal RNA, RNAi, ribozymes, cDNA, recombinant polynucleotides, branched polynucleotides, plasmids, vectors, isolated DNA of any sequence, isolated RNA of any sequence, nucleic acid probes and primers. A polynucleotide can comprise modified nucleotides, such as methylated nucleotides and nucleotide analogs. If present, modifications to the nucleotide structure can be imparted before or after assembly of the polynucleotide. The sequence of nucleotides can be interrupted by non-nucleotide components. A polynucleotide can be further modified after polymerization, such as by conjugation with a labeling component. The term also refers to both double-and single-stranded molecules. Unless otherwise specified or required, any embodiment of this invention that is a polynucleotide encompasses both the double-stranded form and each of two complementary single-stranded forms known or predicted to make up the double-stranded form.

[0115] The terms “oligonucleotide” or “polynucleotide” or “portion,” or “segment” thereof refer to a stretch of polynucleotide residues which is long enough to use in PCR or various hybridization procedures to identify or amplify identical or related parts of mRNA or DNA molecules. The polynucleotide compositions of this invention include RNA, cDNA, genomic DNA, synthetic forms, and mixed polymers, both sense and antisense strands, and may be chemically or biochemically modified or may contain non-natural or derivatized nucleotide bases, as will be readily appreciated by those skilled in the art. Such modifications include, for example, labels, methylation, substitution of one or more of the naturally occurring nucleotides with an analog, internucleotide modifications such as uncharged linkages (e.g., methyl phosphonates, phosphotriesters, phosphoamidates, carbamates, etc.), charged linkages (e.g., phosphorothioates, phosphorodithioates, etc.), pendent moieties (e.g., polypeptides), intercalators (e.g., acridine, psoralen, etc.), chelators, alkylators, and modified linkages (e.g., alpha anomeric nucleic acids, etc.). Also included are synthetic molecules that mimic polynucleotides in their ability to bind to a designated sequence via hydrogen bonding and other chemical interactions. Such molecules are known in the art and include, for example, those in which peptide linkages substitute for phosphate linkages in the backbone of the molecule.

[0116] A polynucleotide is composed of a specific sequence of four nucleotide bases: adenine (A); cytosine (C); guanine (G); thymine (T); and uracil (U) for thymine when the polynucleotide is RNA. In some embodiments, the polynucleotide may comprise one or more other nucleotide bases, such as inosine (I), a nucleoside formed when hypoxanthine is attached to ribofuranose via a β-N9-glycosidic bond, resulting in the chemical structure:

[chemical structure]

Inosine is read by the translation machinery as guanine (G).

[0117] The term “polynucleotide sequence” is the alphabetical representation of a polynucleotide molecule. This alphabetical representation can be input into databases in a computer having a central processing unit and used for bioinformatics applications such as functional genomics and homology searching.

[0118] As used herein, “expression” refers to the process by which polynucleotides are transcribed into mRNA and/or the process by which the transcribed mRNA is subsequently being translated into peptides, polypeptides, or proteins. If the polynucleotide is derived from genomic DNA, expression may include splicing of the mRNA in a eukaryotic cell.

[0119] The terms “equivalent” or “biological equivalent” are used interchangeably when referring to a particular molecule, biological, or cellular material and intend those having minimal homology while still maintaining desired structure or functionality.

[0120] The term “encode” as it is applied to polynucleotides refers to a polynucleotide which is said to “encode” a polypeptide if, in its native state or when manipulated by methods well known to those skilled in the art, it can be transcribed and/or translated to produce the mRNA for the polypeptide and/or a fragment thereof. The antisense strand is the complement of such a nucleic acid, and the encoding sequence can be deduced therefrom.

[0121] As used herein, the term “functional” may be used to modify any molecule, biological, or cellular material to intend that it accomplish a particular, specified effect.

[0122] The compositions for the administration of the CRISPR vectors and systems can be conveniently presented in dosage unit form and can be prepared by any of the methods well known in the art.

[0123] “Administration” can be effected in one dose, continuously or intermittently throughout the course of treatment. Methods of determining the most effective means and dosage of administration are known to those of skill in the art and will vary with the composition used for therapy, the purpose of the therapy, the target cell being treated, and the subject being treated. Single or multiple administrations can be carried out with the dose level and pattern being selected by the treating physician. Suitable dosage formulations and methods of administering the agents are known in the art. Route of administration can also be determined and method of determining the most effective route of administration are known to those of skill in the art and will vary with the composition used for treatment, the purpose of the treatment, the health condition or disease stage of the subject being treated, and target cell or tissue. Non-limiting examples of route of administration include oral administration, nasal administration, injection, and topical application.

[0124] The term “effective amount” refers to a quantity sufficient to achieve a desired effect. In the context of therapeutic or prophylactic applications, the effective amount will depend on the type and severity of the condition at issue and the characteristics of the individual subject, such as general health, age, sex, body weight, and tolerance to pharmaceutical compositions. In the context of an immunogenic composition, in some embodiments the effective amount is the amount sufficient to result in a protective response against a pathogen. In other embodiments, the effective amount of an immunogenic composition is the amount sufficient to result in antibody generation against the antigen. In some embodiments, the effective amount is the amount required to confer passive immunity on a subject in need thereof. With respect to immunogenic compositions, in some embodiments the effective amount will depend on the intended use, the degree of immunogenicity of a particular antigenic compound, and the health/responsiveness of the subject's immune system, in addition to the factors described above. The skilled artisan will be able to determine appropriate amounts depending on these and other factors.

[0125] In the case of an in vitro application, in some embodiments the effective amount will depend on the size and nature of the application in question. It will also depend on the nature and sensitivity of the in vitro target and the methods in use. The skilled artisan will be able to determine the effective amount based on these and other considerations. The effective amount may comprise one or more administrations of a composition depending on the embodiment.

[0126] The term “mutation” as used herein, refers to an alteration to a nucleic acid sequence encoding a protein relative to the consensus sequence of said protein. “Missense” mutations result in the substitution of one codon for another; “nonsense” mutations change a codon from one encoding a particular amino acid to a stop codon. Nonsense mutations often result in truncated translation of proteins. “Silent” mutations are those that have no effect on the resulting protein. As used herein the term “point mutation” refers to a mutation affecting only one nucleotide in a gene sequence. “Splice site mutations” are those mutations present pre-mRNA (prior to processing to remove introns) resulting in mistranslation and often truncation of proteins from incorrect delineation of the splice site.

[0127] “Messenger RNA” or “mRNA” is a nucleic acid molecule that is transcribed from DNA and then processed to remove non-coding sections known as introns. The resulting mRNA is exported from the nucleus (or another locus where the DNA is present) and translated into a protein. The term “pre-mRNA” refers to the strand prior to processing to remove non-coding sections.

[0128] The terms “hairpin,” “hairpin loop,” “stem loop,” and/or “loop” used alone or in combination with “motif” is used in context of an oligonucleotide to refer to a structure formed in single stranded oligonucleotide when sequences within the single strand which are complementary when read in opposite directions base pair to form a region whose conformation resembles a hairpin or loop.

[0129] As used herein, the term “domain” refers to a particular region of a protein or polypeptide and is associated with a particular function. For example, “a domain which associates with an RNA hairpin motif” refers to the domain of a protein that binds one or more RNA hairpin. This binding may optionally be specific to a particular hairpin.

[0130] It is to be inferred without explicit recitation and unless otherwise intended, that when the present disclosure relates to a polypeptide, protein, polynucleotide or antibody, an equivalent or a biologically equivalent of such is intended within the scope of this disclosure. As used herein, the term “biological equivalent thereof” is intended to be synonymous with “equivalent thereof” when referring to a reference protein, antibody, polypeptide or nucleic acid, intends those having minimal homology while still maintaining desired structure or functionality. Unless specifically recited herein, it is contemplated that any polynucleotide, polypeptide or protein mentioned herein also includes equivalents thereof. For example, an equivalent intends at least about 70% homology or identity, or at least 80% homology or identity and alternatively, or at least about 85%, or alternatively at least about 90%, or alternatively at least about 95%, or alternatively 98% percent homology or identity and exhibits substantially equivalent biological activity to the reference protein, polypeptide or nucleic acid. Alternatively, when referring to polynucleotides, an equivalent thereof is a polynucleotide that hybridizes under stringent conditions to the reference polynucleotide or its complement.

[0131] Applicants have provided herein the polypeptide and/or polynucleotide sequences for use in gene and protein editing techniques described below. It should be understood, although not always explicitly stated that the sequences provided herein can be used to provide the expression product as well as substantially identical sequences that produce a protein that has the same biological properties. These “biologically equivalent” or “biologically active” polypeptides are encoded by equivalent polynucleotides as described herein. They may possess at least 60%, or alternatively, at least 65%, or alternatively, at least 70%, or alternatively, at least 75%, or alternatively, at least 80%, or alternatively at least 85%, or alternatively at least 90%, or alternatively at least 95% or alternatively at least 98%, identical primary amino acid sequence to the reference polypeptide when compared using sequence identity methods run under default conditions. Specific polypeptide sequences are provided as examples of particular embodiments. Modifications to the sequences to amino acids with alternate amino acids that have similar charge. Additionally, an equivalent polynucleotide is one that hybridizes under stringent conditions to the reference polynucleotide or its complement or in reference to a polypeptide, a polypeptide encoded by a polynucleotide that hybridizes to the reference encoding polynucleotide under stringent conditions or its complementary strand. Alternatively, an equivalent polypeptide or protein is one that is expressed from an equivalent polynucleotide.

[0132] “Hybridization” refers to a reaction in which one or more polynucleotides react to form a complex that is stabilized via hydrogen bonding between the bases of the nucleotide residues. The hydrogen bonding may occur by Watson-Crick base pairing, Hoogstein binding, or in any other sequence-specific manner. The complex may comprise two strands forming a duplex structure, three or more strands forming a multi-stranded complex, a single self-hybridizing strand, or any combination of these. A hybridization reaction may constitute a step in a more extensive process, such as the initiation of a PC reaction, or the enzymatic cleavage of a polynucleotide by a ribozyme.

[0133] Examples of stringent hybridization conditions include: incubation temperatures of about 25° C. to about 37° C.; hybridization buffer concentrations of about 6×SSC to about 10×SSC; formamide concentrations of about 0% to about 25%; and wash solutions from about 4×SSC to about 8×SSC. Examples of moderate hybridization conditions include: incubation temperatures of about 40° C. to about 50° C.; buffer concentrations of about 9×SSC to about 2×SSC; formamide concentrations of about 30% to about 50%; and wash solutions of about 5×SSC to about 2×SSC. Examples of high stringency conditions include: incubation temperatures of about 55° C. to about 68° C.; buffer concentrations of about 1×SSC to about 0.1×SSC; formamide concentrations of about 55% to about 75%; and wash solutions of about 1×SSC, 0.1×SSC, or deionized water. In general, hybridization incubation times are from 5 minutes to 24 hours, with 1, 2, or more washing steps, and wash incubation times are about 1, 2, or 15 minutes. SSC is 0.15 M NaCl and 15 mM citrate buffer. It is understood that equivalents of SSC using other buffer systems can be employed.

[0134] “Homology” or “identity” or “similarity” refers to sequence similarity between two peptides or between two nucleic acid molecules. Homology can be determined by comparing a position in each sequence that can be aligned for purposes of comparison. When a position in the compared sequence is occupied by the same base or amino acid, then the molecules are homologous at that position. A degree of homology between sequences is a function of the number of matching or homologous positions shared by the sequences. An “unrelated” or “non-homologous” sequence shares less than 40% identity, or alternatively less than 25% identity, with one of the sequences of the present invention.

[0135] As used herein, the term “recombinant expression system” refers to a genetic construct or constructs for the expression of certain genetic material formed by recombination.

[0136] A “vector” is defined as any molecule that can carry inserted polynucleotides into a host cell. Examples of vectors are liposomes, micelles biocompatible polymers, including natural polymers and synthetic polymers; lipoproteins; polypeptides; polysaccharides; lipopolysaccharides; artificial viral envelopes; metal particles; and bacteria, or viruses, such as baculovirus, adenovirus and retrovirus, bacteriophage, cosmid, plasmid, fungal vectors and other recombination vehicles typically used in the art which have been described for expression in a variety of eukaryotic and prokaryotic hosts, and may be used for gene therapy as well as for simple protein expression.

[0137] A polynucleotide disclosed herein can be delivered to a cell or tissue using a gene delivery vehicle. “Gene delivery,” “gene transfer,” “transducing,” and the like as used herein, are terms referring to the introduction of an exogenous polynucleotide (sometimes referred to as a “transgene”) into a host cell, irrespective of the method used for the introduction. Such methods include a variety of well-known techniques such as vector-mediated gene transfer (by, e.g., viral infection/transfection, or various other protein-based or lipid-based gene delivery complexes) as well as techniques facilitating the delivery of “naked” polynucleotides (such as electroporation, “gene gun” delivery and various other techniques used for the introduction of polynucleotides). The introduced polynucleotide may be stably or transiently maintained in the host cell. Stable maintenance typically requires that the introduced polynucleotide either contains an origin of replication compatible with the host cell or integrates into a replicon of the host cell such as an extrachromosomal replicon (e.g., a plasmid) or a nuclear or mitochondrial chromosome. A number of vectors are known to be capable of mediating transfer of genes to mammalian cells, as is known in the art and described herein.

[0138] As used herein, the terms “nucleic acid sequence” and “polynucleotide” are used interchangeably to refer to a polymeric form of nucleotides of any length, either ribonucleotides or deoxyribonucleotides. Thus, this term includes, but is not limited to, single-, double-, or multi-stranded DNA or RNA, genomic DNA, cDNA, DNA-RNA hybrids, or a polymer comprising purine and pyrimidine bases or other natural, chemically or biochemically modified, non-natural, or derivatized nucleotide bases.

[0139] As used herein, a “contiguous” polynucleotide refers to nucleic acid sequence conjugated with each other directly or indirectly.

[0140] A “plasmid” is an extra-chromosomal DNA molecule separate from the chromosomal DNA which is capable of replicating independently of the chromosomal DNA. In many cases, it is circular and double-stranded. Plasmids provide a mechanism for horizontal gene transfer within a population of microbes and typically provide a selective advantage under a given environmental state. Plasmids may carry genes that provide resistance to naturally occurring antibiotics in a competitive environmental niche, or alternatively the proteins produced may act as toxins under similar circumstances.

[0141] “Plasmids” used in genetic engineering are called “plasmid vectors”. Many plasmids are commercially available for such uses. The gene to be replicated is inserted into copies of a plasmid containing genes that make cells resistant to particular antibiotics and a multiple cloning site (MCS, or polylinker), which is a short region containing several commonly used restriction sites allowing the easy insertion of DNA fragments at this location. Another major use of plasmids is to make large amounts of proteins. In this case, researchers grow bacteria containing a plasmid harboring the gene of interest. Just as the bacterium produces proteins to confer its antibiotic resistance, it can also be induced to produce large amounts of proteins from the inserted gene.

[0142] A “yeast artificial chromosome” or “YAC” refers to a vector used to clone large DNA fragments (larger than 100 kb and up to 3000 kb). It is an artificially constructed chromosome and contains the telomeric, centromeric, and replication origin sequences needed for replication and preservation in yeast cells. Built using an initial circular plasmid, they are linearized by using restriction enzymes, and then DNA ligase can add a sequence or gene of interest within the linear molecule by the use of cohesive ends. Yeast expression vectors, such as YACs, YIps (yeast integrating plasmid), and YEps (yeast episomal plasmid), are extremely useful as one can get eukaryotic protein products with posttranslational modifications as yeasts are themselves eukaryotic cells, however YACs have been found to be more unstable than BACs, producing chimeric effects.

[0143] A “viral vector” is defined as a recombinantly produced virus or viral particle that comprises a polynucleotide to be delivered into a host cell, either in vivo, ex vivo or in vitro.

[0144] Examples of viral vectors include retroviral vectors, adenovirus vectors, adeno-associated virus vectors, alphavirus vectors and the like. Infectious tobacco mosaic virus (TMV)-based vectors can be used to manufacturer proteins and have been reported to express Griffithsin in tobacco leaves (O'Keefe et al. (2009) Proc. Nat. Acad. Sci. USA 106(15):6099-6104). Alphavirus vectors, such as Semliki Forest virus-based vectors and Sindbis virus-based vectors, have also been developed for use in gene therapy and immunotherapy. See, Schlesinger & Dubensky (1999) Curr. Opin. Biotechnol. 5:434-439 and Ying et al. (1999) Nat. Med. 5(7):823-827. In aspects where gene transfer is mediated by a retroviral vector, a vector construct refers to the polynucleotide comprising the retroviral genome or part thereof, and a therapeutic gene. Further details as to modern methods of vectors for use in gene transfer may be found in, for example, Kotterman et al. (2015) Viral Vectors for Gene Therapy: Translational and Clinical Outlook Annual Review of Biomedical Engineering 17.

[0145] As used herein, “retroviral mediated gene transfer” or “retroviral transduction” carries the same meaning and refers to the process by which a gene or nucleic acid sequences are stably transferred into the host cell by virtue of the virus entering the cell and integrating its genome into the host cell genome. The virus can enter the host cell via its normal mechanism of infection or be modified such that it binds to a different host cell surface receptor or ligand to enter the cell. As used herein, retroviral vector refers to a viral particle capable of introducing exogenous nucleic acid into a cell through a viral or viral-like entry mechanism.

[0146] Retroviruses carry their genetic information in the form of RNA; however, once the virus infects a cell, the RNA is reverse-transcribed into the DNA form which integrates into the genomic DNA of the infected cell. The integrated DNA form is called a provirus.

[0147] In aspects where gene transfer is mediated by a DNA viral vector, such as an adenovirus (Ad) or adeno-associated virus (AAV), a vector construct refers to the polynucleotide comprising the viral genome or part thereof, and a transgene. Adenoviruses (Ads) are a relatively well characterized, homogenous group of viruses, including over 50 serotypes. Ads do not require integration into the host cell genome. Recombinant Ad derived vectors, particularly those that reduce the potential for recombination and generation of wild-type virus, have also been constructed. Such vectors are commercially available from sources such as Takara Bio USA (Mountain View, CA), Vector Biolabs (Philadelphia, PA), and Creative Biogene (Shirley, NY). Wild-type AAV has high infectivity and specificity integrating into the host cell's genome. See, Wold and Toth (2013) Curr. Gene. Ther. 13(6):421-433, Hermonat & Muzyczka (1984) Proc. Natl. Acad. Sci. USA 81:6466-6470, and Lebkowski et al. (1988) Mol. Cell. Biol. 8:3988-3996.

[0148] Vectors that contain both a promoter and a cloning site into which a polynucleotide can be operatively linked are well known in the art. Such vectors are capable of transcribing RNA in vitro or in vivo, and are commercially available from sources such as Agilent Technologies (Santa Clara, Calif) and Promega Biotech (Madison, Wis.). In order to optimize expression and/or in vitro transcription, it may be necessary to remove, add or alter 5′ and/or 3′ untranslated portions of the clones to eliminate extra, potential inappropriate alternative translation initiation codons or other sequences that may interfere with or reduce expression, either at the level of transcription or translation. Alternatively, consensus ribosome binding sites can be inserted immediately 5′ of the start codon to enhance expression.

[0149] Gene delivery vehicles also include DNA/liposome complexes, micelles and targeted viral protein-DNA complexes. Liposomes that also comprise a targeting antibody or fragment thereof can be used in the methods disclosed herein. In addition to the delivery of polynucleotides to a cell or cell population, direct introduction of the proteins described herein to the cell or cell population can be done by the non-limiting technique of protein transfection, alternatively culturing conditions that can enhance the expression and/or promote the activity of the proteins disclosed herein are other non-limiting techniques.

[0150] As used herein, a “gene editing system” refers to refers to genetic engineering in which a pol nucleotide is inserted, deleted, modified or replaced in a cell, optionally of an insect.

[0151] As used herein, the term “helper” in reference to a virus or plasmid refers to a virus or plasmid used to provide the additional components necessary for replication and packaging of a viral particle or recombinant viral particle. The components encoded by a helper virus may include any genes required for virion assembly, encapsidation, genome replication, and/or packaging. For example, the helper virus may encode necessary enzymes for the replication of the viral genome. Non-limiting examples of helper viruses and plasmids suitable for use with AAV constructs include pHELP (plasmid), adenovirus (virus), or herpesvirus (virus).

[0152] As used herein, the term “AAV” is a standard abbreviation for adeno-associated virus. Adeno-associated virus is a single-stranded DNA parvovirus that grows only in cells in which certain functions are provided by a co-infecting helper virus. General information and reviews of AAV can be found in, for example, Carter, 1989, Handbook of Parvoviruses, Vol. 1, pp. 169-228, and Berns, 1990, Virology, pp. 1743-1764, Raven Press, (New York). It is fully expected that the same principles described in these reviews will be applicable to additional AAV serotypes characterized after the publication dates of the reviews because it is well known that the various serotypes are quite closely related, both structurally and functionally, even at the genetic level. (See, for example, Blacklowe, 1988, pp. 165-174 of Parvoviruses and Human Disease, J. R. Pattison, ed.; and Rose, Comprehensive Virology 3: 1-61 (1974)). For example, all AAV serotypes apparently exhibit very similar replication properties mediated by homologous rep genes; and all bear three related capsid proteins such as those expressed in AAV2. The degree of relatedness is further suggested by heteroduplex analysis which reveals extensive cross-hybridization between serotypes along the length of the genome; and the presence of analogous self-annealing segments at the termini that correspond to “inverted terminal repeat sequences” (ITRs). The similar infectivity patterns also suggest that the replication functions in each serotype are under similar regulatory control.

[0153] An “AAV vector” as used herein refers to a vector comprising one or more polynucleotides of interest (or transgenes) that are flanked by AAV terminal repeat sequences (ITRs). Such AAV vectors can be replicated and packaged into infectious viral particles when present in a host cell that has been transfected with a vector encoding and expressing rep and cap gene products.

[0154] Adeno-associated virus (AAV) is a replication-deficient parvovirus, the single-stranded DNA genome of which is about 4.7 kb in length including two 145 nucleotide inverted terminal repeat (ITRs). There are multiple serotypes of AAV. The nucleotide sequences of the genomes of the AAV serotypes are known. For example, the complete genome of AAV-1 is provided in GenBank Accession No. NC 002077; the complete genome of AAV-2 is provided in GenBank Accession No. NC 001401 and Srivastava et al., J. Virol., 45: 555-564 {1983); the complete genome of AAV-3 is provided in GenBank Accession No. NC_1829; the complete genome of AAV-4 is provided in GenBank Accession No. NC_001829; the AAV-5 genome is provided in GenBank Accession No. AF085716; the complete genome of AAV-6 is provided in GenBank Accession No. NC_00 1862; at least portions of AAV-7 and AAV-8 genomes are provided in GenBank Accession Nos. AX753246 and AX753249, respectively; the AAV-9 genome is provided in Gao et al., J. Virol., 78: 6381-6388 (2004); the AAV-10 genome is provided in Mol. Ther., 13(1): 67-76 (2006); and the AAV-11 genome is provided in Virology, 330(2): 375-383 (2004). The sequence of the AAV rh.74 genome is provided in U.S. Pat. No. 9,434,928, incorporated herein by reference. Cis-acting sequences directing viral DNA replication (rep), encapsidation/packaging and host cell chromosome integration are contained within the AAV ITRs. Three AAV promoters (named p5, p19, and p40 for their relative map locations) drive the expression of the two AAV internal open reading frames encoding rep and cap genes. The two rep promoters (p5 and pi 9), coupled with the differential splicing of the single AAV intron (at nucleotides 2107 and 2227), result in the production of four rep proteins (rep 78, rep 68, rep 52, and rep 40) from the rep gene. Rep proteins possess multiple enzymatic properties that are ultimately responsible for replicating the viral genome. The cap gene is expressed from the p40 promoter and it encodes the three capsid proteins VP1, VP2, and VP3. Alternative splicing and non-consensus translational start sites are responsible for the production of the three related capsid proteins. A single consensus polyadenylation site is located at map position 95 of the AAV genome. The life cycle and genetics of AAV are reviewed in Muzyczka, Current Topics in Microbiology and Immunology, 158: 97-129 (1992).

[0155] AAV possesses unique features that make it attractive as a vector for delivering foreign DNA to cells, for example, in gene therapy. AAV infection of cells in culture is noncytopathic, and natural infection of humans and other animals is silent and asymptomatic. Moreover, AAV infects many mammalian cells allowing the possibility of targeting many different tissues in vivo. Moreover, AAV transduces slowly dividing and non-dividing cells, and can persist essentially for the lifetime of those cells as a transcriptionally active nuclear episome (extrachromosomal element). The AAV proviral genome is inserted as cloned DNA in plasmids, which makes construction of recombinant genomes feasible. Furthermore, because the signals directing AAV replication and genome encapsidation are contained within the ITRs of the AAV genome, some or all of the internal approximately 4.3 kb of the genome (encoding replication and structural capsid proteins, rep-cap) may be replaced with foreign DNA. To generate AAV vectors, the rep and cap proteins may be provided in trans. Another significant feature of AAV is that it is an extremely stable and hearty virus. It easily withstands the conditions used to inactivate adenovirus (56° to 65° C. for several hours), making cold preservation of AAV less critical. AAV may even be lyophilized. Finally, AAV-infected cells are not resistant to superinfection.

[0156] Multiple studies have demonstrated long-term (>1.5 years) recombinant AAV-mediated protein expression in muscle. See, Clark et al., Hum Gene Ther, 8: 659-669 (1997); Kessler et al., Proc Nat. Acad Sc. USA, 93: 14082-14087 (1996); and Xiao et al., J Virol, 70: 8098-8108 (1996). See also, Chao et al., Mol Ther, 2:619-623 (2000) and Chao et al., Mol Ther, 4:217-222 (2001). Moreover, because muscle is highly vascularized, recombinant AAV transduction has resulted in the appearance of transgene products in the systemic circulation following intramuscular injection as described in Herzog et al., Proc Natl Acad Sci USA, 94: 5804-5809 (1997) and Murphy et al., Proc Natl Acad Sci USA, 94: 13921-13926 (1997). Moreover, Lewis et al., J Virol, 76: 8769-8775 (2002) demonstrated that skeletal myofibers possess the necessary cellular factors for correct antibody glycosylation, folding, and secretion, indicating that muscle is capable of stable expression of secreted protein therapeutics. Recombinant AAV (rAAV) genomes of the invention comprise a nucleic acid molecule encoding γ-sarcoglycan and one or more AAV ITRs flanking the nucleic acid molecule. AAV DNA in the rAAV genomes may be from any AAV serotype for which a recombinant virus can be derived including, but not limited to, AAV serotypes AAV-1, AAV-2, AAV-3, AAV-4, AAV-5, AAV-6, AAV-7, AAV-8, AAV-9, AAV-10, AAV-11, AAV-12, AAV-13 and AAV rh74. Production of pseudotyped rAAV is disclosed in, for example, WO 01/83692. Other types of rAAV variants, for example rAAV with capsid mutations, are also contemplated. See, for example, Marsic et al., Molecular Therapy, 22(11): 1900-1909 (2014). The nucleotide sequences of the genomes of various AAV serotypes are known in the art.

[0157] The term “Cas9” refers to a CRISPR associated endonuclease referred to by this name. Non-limiting exemplary Cas9s are provided herein, e.g. the Cas9 provided for in UniProtKB G3ECR1 (CAS9_STRTR) or the Staphylococcus aureus Cas9, as well as the nuclease dead Cas9, orthologs and biological equivalents each thereof. Orthologs include but are not limited to Streptococcus pyogenes Cas9 (“spCas9”); Cas 9 from Streptococcus thermophiles, Legionella pneumophilia, Neisseria lactamica, Neisseria meningitides, Francisella novicida; and Cpf1 (which performs cutting functions analogous to Cas9) from various bacterial species including Acidaminococcus spp. and Francisella novicida U112.

[0158] As used herein, the term “CRISPR” refers to a technique of sequence specific genetic manipulation relying on the clustered regularly interspaced short palindromic repeats pathway. CRISPR can be used to perform gene editing and/or gene regulation, as well as to simply target proteins to a specific genomic location. Gene editing refers to a type of genetic engineering in which the nucleotide sequence of a target polynucleotide is changed through introduction of deletions, insertions, or base substitutions to the polynucleotide sequence. In some aspects, CRISPR-mediated gene editing utilizes the pathways of non-homologous end-joining (NHEJ) or homologous recombination to perform the edits. Gene regulation refers to increasing or decreasing the production of specific gene products such as protein or RNA.

[0159] In one embodiment, the guide polynucleotide is a gRNA. The term “gRNA” or “guide RNA” as used herein refers to the guide RNA sequences used to target specific genes for correction employing the CRISPR technique. Techniques of designing gRNAs and donor therapeutic polynucleotides for target specificity are well known in the art. For example, Doench, J., et al. Nature biotechnology 2014; 32(12):1262-7, Mohr, S. et al. (2016) FEBS Journal 283: 3232-38, and Graham, D., et al. Genome Biol. 2015; 16: 260. gRNA comprises or alternatively consists essentially of, or yet further consists of a fusion polynucleotide comprising CRISPR RNA (crRNA) and trans-activating CRISPR RNA (tracrRNA); or a polynucleotide comprising CRISPR RNA (crRNA) and trans-activating CRISPR RNA (tracrRNA). In some aspects, a gRNA is synthetic (Kelley, M. et al. (2016) J of Biotechnology 233 (2016) 74-83). As used herein, a biological equivalent of a gRNA includes but is not limited to polynucleotides or targeting molecules that can guide a Cas9 or equivalent thereof to a specific nucleotide sequence such as a specific region of a cell's genome.

[0160] A “composition” is intended to mean a combination of active polypeptide, polynucleotide or antibody and another compound or composition, inert (e.g., a detectable label) or active (e.g., a gene delivery vehicle).

[0161] As used herein, with respect to the CRISPR-based technology, the term “guide polynucleotide” refers to a polynucleotide having a “synthetic sequence” capable of binding the corresponding endonuclease enzyme protein (e.g., Cas9) and a variable target sequence capable of binding the genomic target (e.g., a nucleotide sequence found in an exon of a target gene). In some embodiments of the present disclosure, a guide polynucleotide is a guide ribonucleic acid (gRNA). In some embodiments, the variable target sequence of the guide polynucleotide is any sequence within the target that is unique with respect to the rest of the genome and is immediately adjacent to a Protospacer Adjacent Motif (PAM). The exact sequence of the PAM sequence may vary as different endonucleases require different PAM sequences.

[0162] With respect to the endonuclease enzyme protein of the CRISPR-based technology, the term “endonuclease” refers to any suitable endonuclease enzyme protein or a variant thereof that will be specifically directed by the selected guide polynucleotide to enzymatically knock-out the target sequence of the guide polynucleotide. As used herein, the term “variant thereof,” as used with respect to an endonuclease, refers to the referenced endonuclease in its enzymatically functional form expressed in any suitable host organism or expression system and/or including any modifications to enhance the enzymatic activity of the endonuclease. In some embodiments of the present disclosure, a suitable endonuclease includes a CRISPR-associated sequence 9 (Cas9) endonuclease or a variant thereof, a CRISPR-associated sequence 13 (Cas13) endonuclease or a variant thereof, CRISPR-associated sequence 6 (Cash) endonuclease or a variant thereof, a CRISPR from Prevotella and Francisella 1 (Cpf1) endonuclease or a variant thereof, or a CRISPR from Microgenomates and Smithella 1 (Cms1) endonuclease or a variant thereof. In some embodiments of the present disclosure, a suitable endonuclease includes a Streptococcus pyogenes Cas9 (SpCas9), a Staphylococcus aureus Cas9 (SaCas9), a Francisella novicida Cas9 (FnCas9), or a variant thereof. Variants may include a protospacer adjacent motif (PAM) SpCas9 (xCas9), high fidelity SpCas9 (SpCas9-FIF1), a high fidelity SaCas9, or a high fidelity FnCas9. In other embodiments of the present disclosure, the endonuclease comprises a Cas fusion nuclease comprising a Cas9 protein or a variant thereof fused with a Fok1 nuclease or variant thereof. Variants of the Cas9 protein of this fusion nuclease include a catalytically inactive Cas9 (e.g., dead Cas9). In some embodiments of the present disclosure, the endonuclease may be a Cas9, Cas13, Cas6, Cpf1, CMS1 protein, or any variant thereof that is derived or expressed from Methanococcus maripaludis C7, Corynebacterium diphtheria, Corynebacterium efficiens YS-314, Corynebacterium glutamicum (ATCC 13032), Corynebacterium glutamicum (ATCC 13032), Corynebacterium glutamicum R, Corynebacterium kroppenstedtii (DSM 44385), Mycobacterium abscessus (ATCC 19977), Nocardia farcinica IFM1 0 152, Rhodococcus erythropolis PR4, Rhodococcus jostii RFIA1, Rhodococcus opacus B4 (uid36573), Acidothermus cellulolyticus 11B, Arthrobacter chlorophenolicus A6, Kribbella flavida (DSM 17836, uid43465), Thermomonospora curvata (DSM431 83), Bifidobacterium dentium Bd1, Bifidobacterium longum DJO10A, Slackia heliotrinireducens (DSM 20476), Persephonella marina EX H1, Bacteroides fragilis NCTC 9434, Capnocytophaga ochracea (DSM 7271), Flavobacterium psychrophilum JIP02 86, Akkermansia muciniphila (ATCC BAA 835), Roseiflexus castenholzii (DSM 13941), Roseiflexus RS1, Synechocystis PCC6803, Elusimicrobium minutum Pei191, uncultured Termite group 1 bacterium phylotype Rs D 17, Fibrobacter succinogenes S85, Bacillus cereus (ATCC 10987), Listeria innocua, Lactobacillus casei, Lactobacillus rhamnosus GG, Lactobacillus salivarius UCC1 18, Streptococcus agalactiae-5-A909, Streptococcus agalactiae NEM316, Streptococcus agalactiae 2603, Streptococcus dysgalactiae equisimilis GGS 124, Streptococcus equi zooepidemicus MGCS1 0565, Streptococcus gallolyticus UCN34 (uid46061), Streptococcus gordonii Challis subst CH1, Streptococcus mutans NN2025 (uid46353), Streptococcus mutans, Streptococcus pyogenes M 1 GAS, Streptococcus pyogenes MGAS5005, Streptococcus pyogenes MGAS2096, Streptococcus pyogenes MGAS9429, Streptococcus pyogenes MGAS 10270, Streptococcus pyogenes MGAS61 80, Streptococcus pyogenes MGAS31 5, Streptococcus pyogenes SSI-1, Streptococcus pyogenes MGAS1 0750, Streptococcus pyogenes NZ1 3 1, Streptococcus thermophiles CNRZ1 066, Streptococcus thermophiles LMD-9, Streptococcus thermophiles LMG 1831 1, Clostridium botulinum A3 Loch Maree, Clostridium botulinum B Eklund 17B, Clostridium botulinum Ba4 657, Clostridium botulinum F Langeland, Clostridium cellulolyticum H 10, Finegoldia magna (ATCC 29328), Eubacterium rectale (ATCC 33656), Mycoplasma gallisepticum, Mycoplasma mobile 163K, Mycoplasma penetrans, Mycoplasma synoviae 53, Streptobacillus moniliformis (DSM 121 12), Bradyrhizobium BTAil, Nitrobacter hamburgensis X14, Rhodopseudomonas palustris BisB1 8, Rhodopseudomonas palustris BisB5, Parvibaculum lavamentivorans DS-1, Dinoroseobacter shibae. DFL 12, Gluconacetobacter diazotrophicus Pal 5 FAPERJ, Gluconacetobacter diazotrophicus Pal 5 JGI, Azospirillum B51 0 (uid46085), Rhodospirillum rubrum (ATCC 11170), Diaphorobacter TPSY (uid29975), Verminephrobacter eiseniae EF01-2, Neisseria meningitides 053442, Neisseria meningitides alpha14, Neisseria meningitides Z2491, Desulfovibrio salexigens DSM 2638, Campylobacter jejuni doylei 269 97, Campylobacter jejuni 8 1116, Campylobacter jejuni, Campylobacter lari RM21 00, Helicobacter hepaticus, Wolinella succinogenes, Tolumonas auensis DSM 9 187, Pseudoalteromonas atlantica T6c, Shewanella pealeana (ATCC 700345), Legionella pneumophila Paris, Actinobacillus succinogenes 130Z, Pasteurella multocida, Francisella tularensis novicida U112, Francisella tularensis holarctica, Francisella tularensis FSC 198, Francisella tularensis, Francisella tularensis WY96-3418, or Treponema denticola (ATCC 35405).

[0163] The term “cell” as used herein may refer to either a prokaryotic or eukaryotic cell, optionally obtained from a subject or a commercially available source. In one embodiment, the cell is an insect cell.

[0164] “Eukaryotic cells” comprise all of the life kingdoms except monera. They can be easily distinguished through a membrane-bound nucleus. Animals, plants, fungi, and protists are eukaryotes or organisms whose cells are organized into complex structures by internal membranes and a cytoskeleton. The most characteristic membrane-bound structure is the nucleus. Unless specifically recited, the term “host” includes a eukaryotic host, including, for example, yeast, higher plant, insect and mammalian cells. Non-limiting examples of eukaryotic cells or hosts include simian, bovine, porcine, murine, rat, avian, reptilian and human, e.g., HEK293 cells, Chinese Hamster Ovary (CHO) cells and 293T cells.

[0165] “Prokaryotic cells” that usually lack a nucleus or any other membrane-bound organelles and are divided into two domains, bacteria and archaea. In addition to chromosomal DNA, these cells can also contain genetic information in a circular loop called an episome. Bacterial cells are very small, roughly the size of an animal mitochondrion (about 1-2 μm in diameter and 10 μm long). Prokaryotic cells feature three major shapes: rod shaped, spherical, and spiral. Instead of going through elaborate replication processes like eukaryotes, bacterial cells divide by binary fission. Examples include but are not limited to Bacillus bacteria, E. coli bacterium, and Salmonella bacterium.

[0166] As used herein, the terms “engineered” “modified” and like terms refers to the introduction of a heterologous recombinant nucleic acid sequence into the target, such as another nucleic acid sequence, chromosome, cell or insect egg, or insect. As would be understood by one of ordinary skill in the art, techniques for genetic modification of insects are known and described, for example in Cockburn et al., Biotechnology and Genetic Engineering Reviews, 2: 68-99, (1984), the entire contents of which are incorporate herein by reference. In one embodiment, the term “engineered” “integrated” “modified” or the like may refer to the integration of recombinant nucleic acid sequence into the genome of the target insect. The genome of the target insect includes at least one chromosome of the target insect, but may include all relevant chromosome copies. As such, integration into the genome may be heterozygous or homozygous.

[0167] As used herein, the term “female-essential genomic sequence” encompasses any genomic sequence or gene specific to the female insect. Examples of a female-essential genomic sequence include a sex-determination gene or a female-specific splice variant thereof, a gene or splice variant of a gene not found in the male, a gene or splice variant of a gene essential for female gonadal development, and/or a gene or splice variant of a gene not essential for male viability. Non-limiting examples of female-essential genomic sequences include the female-specific exons in the sex-determination genes Sex-lethal (Sxl), sister of sex lethal (Slx), transformer (Tra), transformer-2 (tra-2), Intersex, Proboscipedia (Pb), labrum (Lab), and double sex (Dsx) including homologs, orthologs, and paralogs thereof. In one embodiment, the Intersex gene is the gene encoding mediator of RNA polymerase II transcription subunit 29. As used herein, the term “homolog” refers to the comparable gene of an organism found in another organism conferring the same function. As used herein, the terms “orthologs” and “paralogs” refer to types of homologs. Orthologs are corresponding genes in different lineages and are a result of speciation, and paralogs result from a gene duplication. See, for example, WO 2019/103982. In one embodiment, these sequences are sequences of ans Aedes aegypti mosquito. In another embodiment, these sequences are sequences of a Drosophila suzukii.

[0168] As used herein, the term “male sterility genomic sequence” refers to any male-specific genomic sequence (such as a gene) required for male fertility in an insect which does not affect the development of the male insect or the viability of the male insect. Non-limiting examples of a male-specific genomic sequence required for male fertility in an insect include the genes pTubulin 85D (PTub), beta tubulin (betatub), beta2 tubulin (beta2tub), fuzzy onions (Fzo), protamine A (ProtA), zero population growth (Zpg)1, Cannonball (Can), meiosis I arrest (Mia), P-element induced wimpy testis (PIWI), Heterochromatin Protein 1e (HP1e), zero population growth (Zpg), male sterile (3) K81 (K81), misfire (Mfr), sneaky (Snky), boule (bol), growth arrest specific protein 8 (gas 8), No-hitter (nht), Poly(A) RNA polymerase gld-2 homolog A (Gld2), Nix and spermatocyte arrest (Sa) and homologs, orthologs, and paralogs thereof. In one embodiment, the male sterility genomic sequence also refers to a genomic sequence (such as a gene) required for male mating barrier (such as male sexual behavior or male mating competitiveness, competing with a wild type). Non-limiting examples are fruitless (fru) or Myosin Heavy chain. See, for example, Aryan et al. 2020. In some embodiments, the nucleic acid sequence construct includes one or more second guide polynucleotides targeting one or more male-specific genomic sequence required for male fertility. The functional conservation of pTubulin 85D including Anopheles and Aedes aegypti is described in Catteruccia et al., Nat. Biotechnol. 23, 1414-141 7 (2005) and Smith et al., Insect Mol. Biol. 16, 61-71 (2007), the entire contents of both of which are incorporated herein by reference. Also, see, for example, WO 2019/103982. In one embodiment, these sequences are sequences of ans Aedes aegypti mosquito. In another embodiment, these sequences are sequences of a Drosophila suzukii.

[0169] In some embodiments of the present disclosure, the genetically modified insects and methods for generating the genetically modified insects include insects from the Order Diptera, Lepidoptera, or Coleoptera. In some embodiments of the present disclosure, the genetically modified insects and methods for generating the genetically modified insects include an insect selected from a mosquito of the genera Stegomyia, Aedes, Anopheles, or Culex. Of these genera, example mosquito species include Aedes aegypti, Aedes albopictus, Ochlerotatus triseriatus (Aedes triseriatus), Anopheles stephensi, Anopheles albimanus, Anopheles gambiae, Anopheles quadrimaculatus, Anopheles freeborni, Culex species, or Culiseta melanura.

[0170] In some embodiments, the genetically modified insects and methods for generating the genetically modified insects include any insect selected from one of the following: tephritid fruit fly selected from Medfly (Ceratitis capitata), Mexfly (Anastrepha ludens), Oriental fruit fly (Bactrocera dorsalis), Olive fruit fly (Bactrocera oleae), Melon fly (Bactrocera cucurbitae), Natal fruit fly (Ceratitis rosa), Cherry fruit fly (Rhagoletis cerasi), Queensland fruit fly (Bactrocera tyroni), Peach fruit fly (Bactrocera zonata), Caribbean fruit fly (Anastrepha suspensa), Oriental Fruit Fly (Bactrocera dorsalis), West Indian fruit fly (Anastrepha obliqua), the New World screwworm (Cochliomyia hominivorax), the Old World screwworm (Chrysomya bezziana), Australian sheep blowfly/greenbottle fly (Lucilia cuprina), the pink bollworm (Pectinophora gossypiella), the European Gypsy moth (Lymantria dispar), the Navel Orange Worm (Amyelois transitella), the Peach Twig Borer (Anarsia lineatella), the rice stem borer (Tryporyza incertulas), the noctuid moths, Heliothinae, the Japanese beetle (Papilla japonica), White-fringed beetle (Graphognatus spp.), Boll weevil (Anthonomous grandis), the Colorado potato beetle (Leptinotarsa decern lineata), the vine mealybug (Planococcus ficus), Asian citrus psyllid (Diaphorina citri), Spotted wing drosophila (drosophila suzukii), Bluegreen sharpshooter (Graphocephala atropunctata), Glassy winged sharpshooter (Homalodisca vitripennis), Light brown apple moth (Epiphyas postvittana), Bagrada bug (Bagrada hilaris), Brown marmorated stink bug (Halyomorpha halys), Asian Gypsy Moth selected from the group of Lymantria dispar asiatica, Lymantria dispar japonica, Lymantria albescens, Lymantria umbrosa, and Lymantria postalba, Asian longhorned beetle (Anoplophora glabripennis), Coconut Rhinoceros Beetle (Oryctes rhinoceros), Emerald Ash Borer (Agrilus planipennis), European Grapevine Moth (Lobesia botrana), European Gypsy Moth (Lymantria dispar), False Codling Moth (Thaumatotibia leucotreta), fire ants selected from Solenopsis invicta Buren, and S. richteri Forel, Old World Bollworm (Helicoverpa armigera), Spotted Lanternfly (Lycorma delicatula), Africanized honeybee (Apis mellifera scutellata), Fruit and shoot borer (Leucinodes orbonalis), corn root worm (Diabrotica spp.), Western corn rootworm (Diabrotica virgifera), Whitefly (Bemisia tabaci), House Fly (Musca Domestica), Green Bottle Fly (Lucilia cuprina), Silk Moth (Bombyx mori), Red Scale (Aonidiella aurantia), Dog heartworm (Dirofilaria immitis), Southern pine beetle (Dendroctonus frontalis), Avocado thrip (Thysanoptera Spp.), Botfly selected from Oestridae spp. and Dermatobia hominis), Horse Fly (Tabanus sulcifrons), Horn Fly (Haematobia irritans), Screwworm Fly selected from Cochliomyia macellaria (C. macellaria), C. hominivorax, C. aldrichi, or C. minima, Tsetse Fly (Glossina spp.), Warble Fly selected from Hypoderma bovis or Hypoderma lineatum, Spotted lanternfly (Lycorma delicatula), Khapra beetle (Trogoderma granarium), Honeybee mite (Varroa destructor), Termites (Coptotermes formosanus), Hemlock woolly adelgid (Adelges tsugae), Walnut twig beetle (Pityophthorus juglandis), European wood wasp (Sirex noctilio), Pink-spotted bollworm (Pectinophora scutigera), Two spotted spider mite (Tertanychus urticae), Diamondback moth (Plutella xylostella), Taro caterpillar (Spodoptera litura), Red flour beetle (Tribolium castaneum), Green peach aphid (Myzus persicae), Cotton Aphid (Aphis gossypii), Brown planthopper (Nilaparvata lugens), Beet armyworm (Spodotera exigua), Western flower thrips (Frankliniella occidentalis), Codling moth (Cydia pomonella), Cowpea weevil (Callosobruchus maculatus), Pea aphid (Acyrthosiphon pisum), Tomato leafminer (Tuta absoluta), Onion thrips (Thrips tabaci), and Cotton bollworm (Helicoverpa armigera).

[0171] The term “isolated” as used herein refers to molecules or biologicals or cellular materials being substantially free from other materials.

[0172] As used herein, the term “detectable marker” refers to at least one marker capable of directly or indirectly, producing a detectable signal. A non-exhaustive list of this marker includes enzymes which produce a detectable signal, for example by colorimetry, fluorescence, luminescence, such as horseradish peroxidase, alkaline phosphatase, β-galactosidase, glucose 6-phosphate dehydrogenase, chromophores such as fluorescent, luminescent dyes, groups with electron density detected by electron microscopy or by their electrical property such as conductivity, amperometry, voltammetry, impedance, detectable groups, for example whose molecules are of sufficient size to induce detectable modifications in their physical and/or chemical properties, such detection may be accomplished by optical methods such as diffraction, surface plasmon resonance, surface variation, the contact angle change or physical methods such as atomic force spectroscopy, tunnel effect, or radioactive molecules such as ³²P, ³⁵S or ¹²⁵I.

[0173] As used herein, the term “purification marker” or “selectable marker” refers to at least one marker useful for purification or identification. A non-exhaustive list of this marker includes His, lacZ, GST, maltose-binding protein, NusA, BCCP, c-myc, CaM, FLAG, GFP, YFP, cherry, thioredoxin, poly(NANP), V5, Snap, HA, chitin-binding protein, Softag 1, Softag 3, Strep, or S-protein. Suitable direct or indirect fluorescence marker comprise FLAG, GFP, YFP, RFP, dTomato, cherry, Cy3, Cy 5, Cy 5.5, Cy 7, DNP, AMCA, Biotin, Digoxigenin, Tamra, Texas Red, rhodamine, Alexa fluors, FITC, TRITC or any other fluorescent dye or hapten.

[0174] As used herein, the term “progeny” refers to a descendant or the descendants. In one embodiment, the progeny is an insect egg or a population thereof. In another embodiment, the progeny is an insect or a population thereof. In yet another embodiment, the progeny is one or more of the following: an insect egg, an insect, or a population thereof.

[0175] As used herein, the term “nuclear localization signal” or “NLS” refers to an amino acid sequence that ‘tags’ a protein for import into the cell nucleus by nuclear transport. Typically, this signal consists of one or more short sequences of positively charged lysines or arginines exposed on the protein surface. Different nuclear localized proteins may share the same NLS. An NLS has the opposite function of a nuclear export signal (NES), which targets proteins out of the nucleus.

[0176] As used herein, the term “regulatory sequence” or “expression control sequence” or the like refers to a segment of a nucleic acid molecule which is capable of increasing or decreasing the expression of specific genes within an organism. Expression control or regulatory sequences may include, e.g., include appropriate transcription initiation, termination, promoter and enhancer sequences; efficient RNA processing signals such as splicing and polyadenylation (polyA) signals; sequences that stabilize cytoplasmic mRNA; sequences that enhance translation efficiency (i.e., Kozak consensus sequence); sequences that enhance protein stability; and when desired, sequences that enhance secretion of the encoded product. A promoter may be selected from amongst a constitutive promoter, a tissue-specific promoter, or a cell-specific promoter.

### MODES FOR CARRYING OUT THE DISCLOSURE

[0177] Efficient sexing is an essential component to mosquito sterile insect technique (SIT) programs, since females bite and transmit disease. Additionally, the predilection for assortative mating among sterile insects and higher cost of multi-sex releases further contribute to the need for genetic sexing tools (Knipling 1955). There have been many sexing methods as disclosed: biological (e.g. sex are separated based on pupal dimorphism, female blood feeding preference, or male swarming behaviors); classical chemically/radiation induced male-specific selectable traits; or genetic/transgenic, synthetic male-specific or female lethal traits (as reviewed in Papathanos et al. 2009; Gilles et al. 2014; Catteruccia, Crisanti, and Wimmer 2009). However, there is no current technology that couples genetic sexing with a mechanism for male sterility in early development. The approach as disclosed herein drastically simplifies the SIT technology, making it more feasible and scalable than any existing vector control technology. Moreover, these technologies can be incorporated into any genetic vector and can be used without gene drive technology.

[0178] The Sterile Insect Technique (SIT) is an alternative, highly promising approach that could complement existing control methods. SIT involves the mass-production and release of sterile males, and has historically been used to control, and eradicate, insect pest populations dating back to the mid-1930s (Knipling 1955; Bushland, Lindquist, and Knipling 1955; Klassen and Curtis 2005; Vanderplank 1944; Dyck, Hendrichs, and Robinson 2005). Traditional SIT methodologies have relied on DNA-damaging agents for sterilization, substantially reducing overall fitness and mating competitiveness of released males. To overcome these issues, modern genetic SIT-like systems such as the Release of Insects carrying a Dominant Lethal (MDL) (Thomas et al. 2000; Slade and Morrison 2014), and other methodologies to release fertile males that genetically kill females such as female-specific MDL (fsRIDL) (Fu et al. 2010), and autosomal-linked X-chromosome shredders have been developed (Windbichler, Papathanos, and Crisanti 2008; Alphey 2016). While these first-generation genetic SIT technologies represent significant advances, the use of tetracycline known to ablate the microbiota (Wilkinson 1998) compromises the fitness of RIDL/fsRIDL males, and X-chromosome shredders can in principle only be developed in species with heterogametic sex chromosomes, thereby limiting wide applicability to other species. Furthermore, none of these technologies has been developed for D. suzukii or Aedes aegypti.

[0179] A next-generation highly-efficient technology that can be used for biocontrol of D. suzukii or Aedes aegypti is precision guided SIT (pgSIT). PgSIT functions by exploiting the precision and accuracy of CRISPR to simultaneously disrupt genes essential for either female viability or male fertility. It utilizes a simple breeding scheme requiring two homozygous strains—one expressing Cas9 and the other expressing double guide RNAs (dgRNAs). A single mating between these strains mechanistically results in synchronous RNA-guided dominant biallelic knockouts of both target genes throughout development, resulting in the complete penetrance of desired phenotypes in all progeny. pgSIT in Drosophila melanogaster, a model organism, was previously built (WO 2019/103982, Kandul et al. 2018 and Kandul et al. 2019). It is shown that it is extremely robust at genetically sexing and simultaneously sterilizing resulting progeny reproducibly with 100% efficiency, and that pgSIT sterile males are fit and can compete for mates. pgSIT organism that is closely related to D. suzukii.

A. D. suzukii

[0180] Applicant developed several functional prototype pgSIT systems in D. suzukii informed by the strategy and validated sequences from the work in D. melanogaster (WO 2019/103982, Kandul et al. 2018 and Kandul et al. 2019). For example, applicant built and validated multiple Cas9 expression lines in D. suzukii: nanos (nos-Cas9), vasa (vas-Cas9), bicoid (BicC-Cas9), ubiquitin (ubi-Cas9) and deadhead (Dhd-Cas9). All of these lines have demonstrated up to 100% efficiency when coupled with a gRNA targeting the white eye color gene and the Sxl guide RNA.

[0181] To disrupt female viability, applicant targeted several sex-specifically alternatively spliced sex-determination genes including sex lethal (Sxl), transformer (tra), and doublesex (dsxF), as well as zero population growth (zpg), a germline-specific gap junction gene. The sxl dgRNA line has achieved 100% female lethality in the preliminary crosses to Cas9 lines. To disrupt male fertility, applicant targeted βTub, a gene active during spermatogenesis. Some of these lines, such as sxl and βTub, were combined into a double gRNA (dgRNA) or triple gRNA (tgRNA) lines and resulted in 100% sterile transheterozygous males progeny upon crossing.

[0182] In order to be easily implemented, the pgSIT approach also requires the ability to efficiently separate animals by sex to set up appropriate crosses for sterile male generation (WO 2019/103982, Kandul et al. 2018 and Kandul et al. 2019). Therefore, applicant developed a sex-specific fluorescent reporter transgene that facilitates automated sex sorting. Specifically, applicant designed a transgene that contains a fluorescent marker (dsRed) under the control of a ubiquitous promoter; this transgene includes a female-specific intron that should mediate successful splicing of the dsRed only in females. Applicant obtained transgenic insects with the above transgene and demonstrated that only females express the red marker.

[0183] Here is a non-limiting list of constructs for pgSIT as disclosed herein. Corresponding sequences, features of the sequences and plasmid maps can be found in the drawings while the sequences are provided in the sequence listing.
[0184] Cas9 constructs
   [0185] Vasa-Cas9: 874Z (pBac-vasa-Cas9-2a-eGFP-p10-UTR-Opie2-dsRed)
   [0186] Dhd-Cas9: 874S (pBac-dmeDhd-Cas9-2a-eGFP-p10-UTR-Opie2-dsRed)
   [0187] BicC-Cas9: 874R (pBac-dmeBicC-Cas9-2a-eGFP-p10-UTR-Opie2-dsRed)
   [0188] Ubiq-Cas9: 874W (pBac-dmeUbiq-Cas9-2a-eGFP-p10-UTR-Opie2-dsRed)
   [0189] Nanos-Cas9: 874Z1 (pBac-dmeNanos-Cas9-2a-eGFP-p10-UTR-Opie2-dsRed)
[0190] Double gRNA constructs
   [0191] Initial construct with two sxl gRNA: 1056C.2
      [0192] (HL-U6:3-sxl2-gRNA-UTR-opie-mVenus-SV40-U6:3-sxl1-gRNA-UTR-HR)
   [0193] Four constructs with two sxl, one btub:
      [0194] 1056H: (HL-U6:3-sxl2-gRNA-UTR-opie-mVenus-SV40-U6:3-sxl1-gRNA-UTR-HR-U6-Btuborig2-UTR)
      [0195] 1056I: (HL-U6:3-sxl2-gRNA-UTR-opie-mVenus-SV40-U6:3-sxl1-gRNA-UTR-HR-U6-Btub2-UTR)
      [0196] 1056J: (HL-U6:3-sxl2-gRNA-UTR-opie-mVenus-SV40-U6:3-sxl1-gRNA-UTR-HR-U6-Btub3-UTR)
      [0197] 1056K: (HL-U6:3-sxl2-gRNA-UTR-opie-mVenus-SV40-U6:3-sxl1-gRNA-UTR-HR-U6-Btub4-UTR)
   [0198] Others:
      [0199] 1104D (Sxl and two Cannonball gRNA): pBac-[U6-gRNA-Slx]-[U6-gRNA #2]-[Opie2-eGFP-p10]-[U6-gRNA #1-Can]
      [0200] 1104E (Sxl and two Mia gRNA): pBac-[U6-gRNA-Slx]-[U6-gRNA-Mia #1]-[Opie2-eGFP-p10]-[U6-gRNA-Mia #2]
      [0201] 1104J (Sxl and two Zpg gRNA): pBac-[U6-gRNA-Slx]-[U6-gRNA-Zpg #1]-[Opie2-eGFP-p10]-[U6-gRNA-Zpg #2]
      [0202] 1104H (Sxl and two PIWI gRNA): pBac-[U6-gRNA-Slx]-[U6-gRNA-PIWI #1]-[Opie2-eGFP-p10]-[U6-gRNA-PIWI #2]
      [0203] 1104I (Sxl and two HP1e gRNA): pBac-[U6-gRNA-Slx]-[U6-gRNA-HP1e #1]-[Opie2-eGFP-p10]-[U6-gRNA-HP1e #2]
      [0204] 1104K (Sxl and two K81 gRNA): pBac-[U6-gRNA-Slx]-[U6-gRNA-K81 #1]-[Opie2-eGFP-p10]-[U6-gRNA-K81 #2]
      [0205] 1104M (Sxl and two Mfr gRNA): pBac-[U6-gRNA-Slx]-[U6-gRNA-Mfr #1]-[Opie2-eGFP-p10]-[U6-gRNA-Mfr #2]
      [0206] 1104N (Sxl and two Snky gRNA): pBac-[U6-gRNA-Slx]-[U6-gRNA-Snky #1]-[Opie2-eGFP-p10]-[U6-gRNA-Snky #2]
         B. Aedes aegypti.

[0207] The disclosed technology described herein generates a precision guided SIT (pgSIT) technology which simultaneously knock-outs female viability (e.g. sex determinate) and male fertility genes using a binary CRISPR/Cas9 system in the dengue, Zika and yellow fever vector, Ae. aegypti. Importantly, as the proof-of-principle, the efficiency of pgSIT in Drosophila melanogaster was demonstrated (WO 2019/103982, Kandul et al. 2018 and Kandul et al. 2019). Specifically, D. melanogaster lines were created each expressing either Cas9 endonuclease or double guide RNAs (gRNAs), targeting one of the female-specific variants of sex determination genes sex lethal (sxl), transformer (tra), or doublesex (dsx) and a male fertility gene, beta tubulin (βTub). A simple genetic cross between Cas9 and gRNAs homozygous strains resulted in simultaneous Cas9/gRNA-based knockouts of both female viability and male sterility genes, and caused 100% male sterility and depending on which gRNAs combination was used, female lethality or masculinization in F₁ progeny. Notably, the longevity and competitiveness of pgSIT males were not compromised (WO 2019/103982, Kandul et al. 2018 and Kandul et al. 2019). As disclosed herein, constructs, compositions and methods were applied to the primary disease vector, Ae. aegypti.

[0208] Here is a non-limiting list of constructs for pgSIT as disclosed herein. Corresponding sequences, features of the sequences and plasmid maps can be found in the drawings while the sequences are provided in the sequence listing.
[0209] Cas9 constructs
   [0210] Exuperentia-cas9 (874L)
   [0211] 4-nitrophenylphosphatase-cas9 (874M)
   [0212] Trunk-cas9 (874N)
   [0213] Nup50-cas9 (874P)
   [0214] Polyubiquitin-cas9 (874X)
   [0215] Ubiquitin L40-cas9 (874Y)
   [0216] Vasa-cas9 (874Y3)
[0217] gRNA constructs/plasmids
   [0218] 2 gRNAs
      [0219] β-tubulin (1055A)
      [0220] β-tubulin (1055B)
      [0221] Double sex (1055C)
      [0222] Double sex (1055D)
      [0223] Zpg (1055E)
      [0224] Zpg (1055F)
      [0225] Intersex (1055J)
      [0226] Labrum (1055Y)
      [0227] Sister of sex lethal (1055Z)
      [0228] Proboscipedia (1055T)
   [0229] 4 gRNAs
      [0230] β-tubulin (1067A)
      [0231] Double sex (1067B)
      [0232] Zpg (1067C)
      [0233] Dsx+Isx+βtub (1067D)
      [0234] Dsx+βtub (1067E)
      [0235] Dsx+βtub (1067F)
      [0236] Dsx+Zpg (1067G)
   [0237] 6 gRNAs
      [0238] Dsx+βtub (1067H)
      [0239] Dsx+Isx+βtub (1067L)

### C. Non-Limiting Advantages

[0240] The technology as disclosed herein is an innovative improvement upon current SIT and female-killing approaches to suppress disease vector populations. The main competitor technology for this approach is the Oxitec's RIDL system, which involves the expression of a tetracycline-repressible transactivator fusion protein (tTa), which binds to the tetracycline-responsive element (tRe), driving expression of a toxin in the absence of the drug tetracycline. In the presence of tetracycline, Oxitec's RIDL system is silenced, the toxin is not produced, and progeny survive. Therefore, to mass rear insects carrying the RIDL system, progeny must be provided a diet supplemented with large amounts of tetracycline. Growth on tetracycline has numerous unwanted side effects on insects, such as loss of the gut microbiome, loss of symbiotic bacteria, and effects on mitochondrial function (Moullan et al. 2015; Chatzispyrou et al. 2015). Thus, not surprisingly, the feeding of tetracycline has recently been shown to impose a large fitness cost in insects (Zeh et al. 2012). Moreover, the RIDL system requires labor intensive manual sexing of the final product, and manual release of adult males at the release site. In order to generate these males for release, factories need to be constructed near release sites, due to the fact that adult male mosquitoes are very fragile and cannot be easily transported to remote locations. These restrictions make the RIDL system expensive and difficult to scale and service globally (FIG. 5). Consequently, the demonstrated release sites for the RIDL technologies have been relatively small and limited to regions near the production factories—primarily due to scalability factors (i.e. fitness costs, requirement for manual sexing of product, manual adult release near factory site) (for example, Carvalho et al. 2015). Together, these observations indicate that while Oxitec's RIDL system is able to suppress wild populations, a genetic system with a similar outcome, that does not impose a major antibiotic based fitness cost on the sterile males generated and is highly scalable would be advantageous. More importantly, the final product is genetically sexed early in development, so eggs can be released into the environment (requiring only one factory to service the entire world!), which is a significant advancement and improvement to the current technology (WO 2019/103982, Kandul et al. 2018 and Kandul et al 2019). Additionally, for SIT to be very effective—scalability is a must—the more scalable the system the greater number of sterile insects that can generated and released into the environment thereby resulting in a quicker population suppression effect that can be maintained.

[0241] In the approach as disclosed herein, eggs can be hatched directly into the environment (e.g. sprayed via drones), or alternatively a simple hatching strategy could be devised consisting of uniform egg packets, water containers and food packets—10 days later all the surviving mosquitoes will be sterile males that can be released directly into the environment. These hatching procedures require few resources and limited training, which simplifies application at any site, especially those in resource limited areas. Moreover, given that eggs can be distributed (as opposed to very fragile adult males) this enables one of skill in the art to reach remote locations around the globe, and eggs also facilitate the scalability in the environment (i.e. simply release more eggs every generation) which could lead to complete eradication of mosquito vectors or fly vectors, such as D. suzukii or Aedes aegypti. The simplicity of this system is among its biggest strengths. Additionally, the technology allows release of any mosquito or fly life stage, which makes this an essential technology if the expected entomological or epidemiological impact is predicted to be highest from the release of another life stage. For instance, high egg-stage mortality and high density dependent mortality of Ae. aegypti makes release of larval stage mosquitoes optimal in some scenarios (Yakob et al. 2017); however, with the approach as disclosed herein the sexing is done in an early embryonic stage allowing release at any stage. Therefore, in contrast to current technologies, the disclosed technology is highly: (1) adaptable, (2) efficient and reproducible, (3) scalable, (4) production efficient, and (5) environment-friendly.

[0242] Adaptable: The CRISPR/Cas9 system was successfully applied to a large number of insect species, including disease vectors (Kistler, Vosshall, and Matthews 2015; Gantz et al. 2015; Reid and O'Brochta 2016; Hammond et al. 2015), agricultural pests (Y. Li et al. 2016; Awata et al. 2015; Huang et al. 2016), beneficial insects (Ma et al. 2014; X. Li et al. 2015) and valuable research species (Bassett et al. 2013; Gratz et al. 2013) as well as a large number of non-insect species. Additionally, this binary approach only requires two components: Cas9 and gRNA, which greatly simplifies its application to vector control in comparison to the current RIDL (Thomas et al. 2000) and Wolbachia systems. The modular design of the system also permits easy modification of the components. To target different genes, the 23 bp gRNA target for CRISPR/Cas9 can be trivially replaced with a new gRNA targeting a different gene. The genes targeted for knockout can be interspecific, targeting a gene highly conserved between vector species, or species specific. Moreover, other CRISPR endonucleases, like Cpf1a and crRNA (Zetsche et al. 2015) can be added to the technology and bring more specificity and/or stronger knockout effect. Likewise, this technology does not require drugs or chemicals, such as in the RIDL (Thomas et al. 2000), to rear insects in the laboratory, which are known to have a negative effect on mitochondria (Moullan et al. 2015; Chatzispyrou et al. 2015) and insect gut microflora (Kalghatgi et al. 2013).

[0243] Efficient and Reproducible: The efficiency of pgSIT relies on the high cleavage rate of wt alleles by Cas9/gRNA and the inability of insect to rescue mosaic loss-of-function phenotype at the organismic level. Any CRISPR-based gene-drive system requires two actions: (1) cleavage of a target locus by Cas9/gRNA, and (2) homology directed repair (HDR) of the cut locus to integrate a transgene carrying the Cas9/gRNA system. The Cas9/gRNA-based cleavage is highly efficient process and results in numerous specific DNA cuts (WO 2019/103982, Kandul et al. 2018, Kandul et al. 2019; Oberhofer, Ivy, and Hay 2018) that can be repaired by HDR or non-homologous end joining (NHEJ) or other DNA repair pathways. NHEJ is the most efficient and common DNA repair pathways, while HDR is less efficient and limited to germ cells. Nevertheless, products of HDR carry an integrated transgene precisely at the target locus and thus are not recognized by Cas9/gRNA and selected for by a CRISPR gene drive (60%-85% of wt alleles are converted, Chu et al. 2015; Liang et al. 2017; Maruyama et al. 2015), while the precise ligation of cut alleles by NHEJ reconstitutes the target site that will be cut again by Cas9/gRNA. In short, this is how any CRISPR gene drive operates. However, rare imprecise ligations of the cut allele by NHEJ insert deletions or insertions and thus also become resistant (aka. non-complementary) to Cas9/gRNA system. In fact, any CRISPR-based gene-drive actively creates resistance alleles that are immune to further cleavage as well as samples and propagates naturally occurring resistance alleles. Accumulation of both types of resistance alleles slows down and eventually blocks a CRISPR gene drive (KaramiNejadRanjbar et al. 2018; Oberhofer, Ivy, and Hay 2018; Gantz et al. 2015; Champer et al. 2017). pgSIT relies on the high cleavage efficiency by the Cas9/gRNA system and NHEJ proficiency to cause mosaic mutations (aka. indels) at conserved loci and achieve loss-of-function phenotypes at the organismic level. The observations of multiple pgSIT systems engineered in D. melanogaster suggest that Cas9/gRNA knockouts in somatic and germ tissues early during insect development ensures the complete penetrance of loss-of-function phenotypes in an adult insect (WO 2019/103982, Kandul et al. 2018 and Kandul et al. 2019). Moreover, given that pgSIT sterile males are developed using only laboratory strains with known sequences at targeted loci in a factory, then released, the genetic diversity in the wild will NOT affect the pgSIT technology, i.e. the males are already sterile. Therefore, the significant advantage of the disclosed technology over any gene drive systems is that pgSIT is NOT creating resistance alleles and NOT sampling natural occurring alleles.

[0244] Scalable: A remarkable benefit of the pgSIT technology is that the homozygous Cas9 (A/A) and homozygous gRNA (BB) lines can be healthily maintained separately and then crossed in a central facility and the resulting F1 trans-heterozygous CRISPR/Cas9 (AB) sterile male eggs, can be distributed to any location for immediate hatching and release (WO 2019/103982, Kandul et al. 2018 and Kandul et al. 2019). pgSIT would eliminate the high cost (and error) associated with rearing and sexing mosquitoes near release locations as well as have the benefit of improved quality control and supply chain management from centralized manufacturing, especially for applications in resource limited locations. This feature makes the technology as disclosed herein especially attractive for licensing by companies for insect control and population suppression. The technology is especially beneficial for population control of Ae. aegypti, whose eggs require a diapause for a normal development and can remain viable as dried eggs for a year (Diniz et al. 2017) making the egg distribution extremely tractable.

[0245] Production efficient: The pgSIT technology provides a simple procedure to mass-produce sterile mosquito or fly males, preferred for release as the male mosquitos do not bite or transmit disease. Currently, there are no highly efficient, non-labor-intensive genetic methods to kill all female mosquitoes early in development (Papathanos et al. 2009). Sexing at the pupal or adult stages is highly labor-intensive, imprecise, or not feasible for large scale production. Many mosquito production systems that are currently available are prohibitively expensive for most target disease endemic countries and they require infrastructure that is simply not reliable in resource-limited countries. For example, the Debug program at Verily has generated a state-of-the-art automated mosquito rearing and sexing facility that achieves essentially 100% sexing accuracy for their population suppression Wolbachia strains. However, this technology requires large and expensive facilities and since mosquitoes are still sexed at the adult stage, they cannot be shipped great distances and therefore need to be produced near the release site. Many of the areas with the highest need for vector-borne disease interventions lack reliable electricity, water, supply chains and other resources that are required to reliably produce mosquitoes with this technology as well as maintain these facilities. Furthermore, deviations in these resources would likely lead to sexing errors or at a minimum slow down the production process. Therefore, this technology is likely only feasible in developed countries, which have less epidemiological need for these technologies. Other less intensive sexing methods, such as sexing mosquitoes by size are inaccurate resulting in the undesired release of females. In this approach as disclosed herein, the simple pgSIT system either kills or masculinizes all females, rendering all viable progeny to be sterile males that can be released as eggs (WO 2019/103982, Kandul et al. 2018 and Kandul et al. 2019).

[0246] Environment-friendly: The technology is an environment-friendly SIT, which is species-specific and would fit into the standard SIT legal framework. Therefore, the permits and procedures established for mosquitoes and SIT insects in multiple countries, like Brazil, US, Cayman Islands etc., can be easily adopted for the CRISPR/Cas9 based SIT approach as disclosed herein enabling this system to be moved to the field quickly.

[0247] The presently disclosed pgSIT methods of male sexing and methods of male sexing and sterility use the precision and accuracy of CRISPR-based technology to disrupt genes essential for female viability (for male sexing) or concurrently or simultaneously disrupt genes essential for female viability and male fertility. The pgSIT methods of the present disclosure utilize a simple breeding scheme requiring two insect strains (a first parent strain and a second parental strain), one expressing an endonuclease (e.g., Cas9) and the other expressing a nucleic acid sequence construct having at least one guide polynucleotide directed to the gene or genes to be disrupted. A single mating between these two parental strains mechanistically results in synchronous polynucleotide-guided (e.g., RNAguided) dominant allelic or dominant biallelic knockouts of the target gene or genes throughout development.

[0248] CRISPR technology refers to clustered regularly interspaced short palindromic repeats and has been extensively studied and modified for genome editing in most studied organisms as disclosed in Sternberg and Doudna, Mol. Cell 58, 568-574 (201 5), the entire contents of which are herein incorporated by reference.

[0249] As used herein, with respect to the CRISPR-based technology, the term “guide RNA” refers to a polynucleotide having a “synthetic sequence” capable of binding the corresponding endonuclease enzyme protein (e.g., Cas9) and a variable target sequence capable of binding the genomic target (e.g., a nucleotide sequence found in an exon of a target gene). In some embodiments of the present disclosure, a guide polynucleotide is a guide ribonucleic acid (gRNA). In some embodiments, the variable target sequence of the guide polynucleotide is any sequence within the target that is unique with respect to the rest of the genome and is immediately adjacent to a Protospacer Adjacent Motif (PAM). The exact sequence of the PAM sequence may vary as different endonucleases require different PAM sequences. As used herein, the expression “single heterologous construct having two different single guide RNAs (sgRNAs)” refers to a double guide RNA (dgRNA).

[0250] As used herein, the term “introducing an endonuclease” into a target insect refers to the recombinant introduction of an endonuclease into the insect such that the endonuclease is present in the insect. Introduction of an endonuclease into an insect does not require genomic integration, but may include genomic integration.

[0251] Table 1 lists non-limiting candidate female lethality genes and candidate male sterility genes.

TABLE 1
Rationally selected candidate female lethality or male sterility genes

| | | | |
|---|---|---|---|
| Gene | Function(s) | Selection Parameters | Refs. |

Potential Female Lethality Genes

| | | | |
|---|---|---|---|
| double sex (dsx) | sexually dimorphic | main sex determination gene | Many, (Kyrou et al. 2018) |
| | morphology, | across insects | |
| | physiology, and | female lethality in the | |
| | behavior | previous work; Female | |
| | | sterility or intersex physiology | |
| | | in A, gambiae | |
| transformer-2 | sexually dimorphic | A. aegypti-kd resulted in | (Hoang et al. 2016) |
| (tra-2) | morphology, | increased female lethality | |
| | physiology, and | | |
| | behavior | | |

Potential Male Sterility Genes

| | | | |
|---|---|---|---|
| beta tubulin beta | testis-specific | A. aegypti and Anopheles- | (Hoyle et al. 1995; |
| 2 isoform | | testis specific | Catteruccia, Benton, |
| (β2Tub) | | Drosophila-kd induced male | and Crisanti 2005) |
| | | sterility | |
| boule (bol) | Testis-specific; | A. aegypti-transient kd in | (Whyard et al. 2015; |
| | spermatogenesis and | larvae resulted in high male | Sekiné, Furusawa, |
| | germ cell development | sterility | and Hatakeyama |
| | | | 2015) |
| Gld2 | sperm maturation | sperm maturation in D. | (Sartain et al. 2011) |
| | | melanogaster and putative | |
| | | orthologs in Aedes and | |
| | | Anopheles spp. | |
| growth arrest | testis specific | A. aegypti-transient kd in | (Whyard et al. 2015) |
| specific protein | | larvae resulted in high male | |
| 8 (gas 8) | | sterility | |
| fuzzy onions | mitochondrial fusion | A. aegypti-transient kd in | (Yaffe 1997; Hwa et |
| | factor during sperm | larvae resulted in high male | al. 2002) |
| | formation | sterility | |
| Nix | male development | feminization or genital | (Hall et al. 2015) |
| | | deformities in A. aegypti, but | |
| | | not present in other species | |
| No-hitter (nht) | spermatid | A. aegypti-transient kd in | (Whyard et al. 2015) |
| | differentiation | larvae resulted in high male | |
| | | sterility | |
| zero population | male fertility | An. gambiae-transient kd in | (Thailayil et al. |
| growth (zpg) | | embryo increased male | 2011; Whyard et al. |
| | | sterility; A. aegypti-transient | 2015) |
| | | kd resulted in high male | |
| | | sterility | |

Potential Male Mating Barrier Genes

| | | | |
|---|---|---|---|
| fruitless (fru) | male sexual behavior, | Drosophila, anophelines and | (Salvemini et al. |
| | male muscle | A. aegypti | 2013) |
| | differentiation | | |

### Compositions and Methods

[0252] In one aspect, provided is a mating system producing a genetically modified progeny that is a sterile male insect of Drosophila suzukii or Aedes aegypti mosquito. The method comprises, or consists essentially of, or yet further consists of genetically a first parental insect and a second parental insect. In one embodiment, the first parental insect comprises, or consists essentially of, or yet further consists of at least one nucleic acid sequence that comprises, or consists essentially of, or yet further consists of: (a) at least a first guide RNA targeting a female essential genomic sequence that is required for female-specific viability in Drosophila suzukii or Aedes aegypti, and (b) at least a second guide RNA targeting a male sterility genomic sequence that is required for male-specific fertility in Drosophila suzukii or Aedes aegypti.

[0253] In some aspects and/or embodiments of the disclosure herein, the guide polynucleotide targets one or more of doublesex (DSX), IS, Myosin Heavy chain, and Beta2tub. In some aspects and/or embodiments of the disclosure herein, the guide polynucleotide targeting a sex-specifically alternatively spliced sex-determination gene optionally selected from: sex lethal (Sxl), transformer (tra), doublesex (dsxF), or those listed in Table 1 and/or disclosed herein. In some aspects and/or embodiments of the disclosure herein, the guide polynucleotide targets a gene active during spermatogenesis optionally selected from βTubulin 85D (βTub), fuzzy onions (fzo), protamine A (ProtA), or spermatocyte arrest. In some aspects and/or embodiments of the disclosure herein, the guide polynucleotide targets one or more of those identified in Table 1 or otherwise disclosed herein.

[0254] In a further embodiment, the targeted sequence required for female-specific viability in Aedes aegypti is selected from a sequence of the Intersex (mediator of RNA polymerase II transcription subunit 29) or labrum (Lab) gene. In another embodiment, the targeted sequence required for male-specific fertility in Aedes aegypti is a sequence of the zero population growth (Zpg)1 gene.

[0255] In some embodiments, the targeted sequence is a sequence in the gene exon. The targeted sequence or a fragment thereof hybridizes to the corresponding gRNA. In one embodiment, the targeted sequence hybridizes to the corresponding gRNA without any mismatches. In another embodiment, the targeted sequence hybridizes to the corresponding gRNA with 1, 2, 3, 4, 5, 6, 7, 8, 9, 10 or more mismatches. Based on the targeted sequence, the gRNA sequence can be determined. In one embodiment, a gRNA comprises, or consists essentially of, or yet further consists of a sequence complement to a targeted sequence, such as those as disclosed herein, or an equivalent that is capable of binding to the same targeted sequence but comprises 1, 2, 3, 4, 5, 6, 7, 8, 9, 10 or more mismatches. In another embodiment, a gRNA comprises, or consists essentially of, or yet further consists of a sequence reverse-complement to a targeted sequence, such as those as disclosed herein, or an equivalent that is capable of binding to the same targeted sequence but comprises 1, 2, 3, 4, 5, 6, 7, 8, 9, 10 or more mismatches. In yet another embodiment, a gRNA comprises, or consists essentially of, or yet further consists of a sequence reverse to a targeted sequence, such as those as disclosed herein, or an equivalent that is capable of binding to the same targeted sequence but comprises 1, 2, 3, 4, 5, 6, 7, 8, 9, 10 or more mismatches.

[0256] In some embodiments, the targeted sequence required for male-specific fertility in Drosophila suzukii is selected from a sequence of Cannonball (Can), meiosis I arrest (Mia), P-element induced wimpy testis (PIWI), Heterochromatin Protein 1e (HP1e), zero population growth (Zpg), male sterile (3) K81 (K81), misfire (Mfr), or sneaky (Snky). In a further embodiment, the targeted sequence is a sequence in the gene exon.

[0257] In some embodiments, the second parental insect comprises, or consists essentially of, or yet further consists of a nucleic acid that encodes an endonuclease under the control of a regulatory sequence that is suitable for directing protein expression in Drosophila suzukii or Aedes aegypti.

[0258] In some embodiments, the targeted sequence required for female-specific viability in Aedes aegypti comprises, or consists essentially of, or yet further consists of a sequence selected from:

(Intersex1, SEQ ID NO: 58)
GCGGGATTCGCTCTCGACGA,
(Intersex2, SEQ ID NO: 59)
GGACAACATTTCCAAGGTTA,
(labrum (Lab) 5, SEQ ID NO: 60)
GCACTAGTGGGATATCCTGA,
or
(labrum (Lab) 4, SEQ ID NO: 61)
GTCCAGGAAGCATTTGGTAT.

[0259] In some embodiments, the targeted sequence required for male-specific fertility in Aedes aegypti comprises, or consists essentially of, or yet further consists of a sequence selected from:

(Zpg1, SEQ ID NO: 62)
GTGTAGACTGGCCCTAACGG,
(Zpg2, SEQ ID NO: 63)
TCTCGTTCCCCAAACACTTG,
(Zpg3, SEQ ID NO: 64)
TCATCAAGAACATGTTCAGG,
or
(Zpg4, SEQ ID NO: 65)
ACAGTTGGAACCGAACGCTG.

[0260] In some embodiments, the targeted sequence required for male-specific fertility in Drosophila suzukii comprises, or consists essentially of, or yet further consists of a sequence selected from:

(Cannonball (Can), SEQ ID NO: 66)
GCTACAGAGGAATGGCCCAG,
(Cannonball (Can), SEQ ID NO: 67)
GGATCGGGATAACCTGCCGT,
(meiosis I arrest (Mia), SEQ ID NO: 68)
GAGAATCCCCTTGTTGCGGG,
(meiosis I arrest (Mia), SEQ ID NO: 69)
GAGCTCTGACCATCCGCATG,
(P-element induced wimpy testis (PIWI),
SEQ ID NO: 70)
GGTGTTGGACAGCACATCGA,
(P-element induced wimpy testis (PIWI),
SEQ ID NO: 71)
GAGCACACGTGATCGCAAGA,
(Heterochromatin Protein 1e (HP1e), SEQ ID NO: 72)
CAACCTCAAgTTGTaCCAAG,
(Heterochromatin Protein 1e (HP1e), SEQ ID NO: 73)
GGATTATCCAAAACTAAGCA,
(zero population growth (Zpg), SEQ ID NO: 74)
GCAACTGCAAACGCATTCCG,
(zero population growth (Zpg), SEQ ID NO: 75)
GCCCAAGTTGCACCTGCAGG,
(male sterile (3) K81 (K81), SEQ ID NO: 76)
GATCACAGCGAGTTCTTCGG,
(male sterile (3) K81 (K81), SEQ ID NO: 77)
GGAGTTGGGGTCGTCGACAT,
(misfire (Mfr), SEQ ID NO: 78)
GGCGTCAAGTTCAAGAAGCA,
(misfire (Mfr), SEQ ID NO: 79)
GAGAACGGGACACTGGCAGG,
(sneaky (Snky), SEQ ID NO: 80)
GACTTCTCGTAGGTGCGCAA,
and
(sneaky (Snky), SEQ ID NO: 81)
GTAGGTGCGCAATGGTAAGA.

[0261] In some embodiments, the regulatory sequence that is suitable for directing protein expression in Drosophila suzukii comprises, or consists essentially of, or yet further consists of a promoter. In a further embodiment, the promoter comprises, or consists essentially of, or yet further consists of a sequence selected from: nt 4360 to nt 6582 of SEQ ID NO: 1 or nt 4360 to nt 6600 of SEQ ID NO: 2 (874Z promoter sequence), nt 4366 to nt 4873 of SEQ ID NO: 3 (874S promoter sequence), nt 4366 to nt 7196 of SEQ ID NO: 4 (874R promoter sequence), nt 4366 to nt 6233 of SEQ ID NO: 5 (874W promoter sequence), or nt 4360 to nt 5291 of SEQ ID NO: 6 (874Z1 promoter sequence). In one embodiment, the promoter comprises, or consists essentially of, or yet further consists of a sequence of nt 4366 to nt 6233 of SEQ ID NO: 5 (874W promoter sequence).

[0262] In some embodiments, the regulatory sequence suitable for directing protein expression in Aedes aegypti mosquito comprises, or consists essentially of, or yet further consists of a promoter comprises, or consists essentially of, or yet further consists of a sequence selected from nt 4366 to nt 6497 of SEQ ID NO: 22 (874L promoter sequence), nt 4366 to nt 6865 of SEQ ID NO: 23 or a fragment thereof comprising, or consists essentially of, or yet further consists of an AAEL007097 promoter (874M promoter sequence), nt 4366 to nt 7404 of SEQ ID NO: 24 (874N promoter sequence), nt 4366 to nt 7399 of SEQ ID NO: 25 (874P promoter sequence), or nt 4366 to nt 5751 of SEQ ID NO: 26 (874X promoter sequence), or nt 4366 to nt 4786 of SEQ ID NO: 27 (874Y promoter sequence) or nt 4363 to nt 7162 of SEQ ID NO: 28 (874Y3 promoter sequence). In one embodiment, the promoter comprises, or consists essentially of, or yet further consists of a sequence of nt 4366 to nt 7399 of SEQ ID NO: 25 (874P promoter sequence). In another embodiment, the promoter comprises, or consists essentially of, or yet further consists of a sequence of nt 4366 to nt 4786 of SEQ ID NO: 27 (874Y promoter sequence).

[0263] In another aspect, provided is a mating system producing a genetically modified progeny that is a sterile male insect of Drosophila suzukii or Aedes aegypti mosquito, comprising, or consists essentially of, or yet further consists of a first parental insect and a second parental insect. In some embodiments, the first parental insect comprises, or consists essentially of, or yet further consists of at least one nucleic acid sequence that comprises, or consists essentially of, or yet further consists of: (a) at least a first guide RNA targeting a female essential genomic sequence that is required for female-specific viability in Drosophila suzukii or Aedes aegypti, and (b) at least a second guide RNA targeting a male sterility genomic sequence that is required for male-specific fertility in Drosophila suzukii or Aedes aegypti.

[0264] In some embodiments, the targeted sequence required for female-specific viability in Drosophila suzukii comprises, or consists essentially of, or yet further consists of a sequence of GGCGGCAGCGGCGGGAATGG (Sxl—Max Scott site, SEQ ID NO: 82). In another embodiments, the targeted sequence required for male-specific fertility in Drosophila suzukii comprises, or consists essentially of, or yet further consists of a sequence selected from:

(Btub Original site 2, SEQ ID NO: 83)
TGGCGGTACCGGCTCCGGAA,
(Btub site 2, SEQ ID NO: 84)
CTTGAGTGTGCACCAGCTGG,
(Btub site 3, SEQ ID NO: 85)
CAATGCGGTAACCAGATCGG,
(Btub site 4, SEQ ID NO: 86)
GCCTCGGGGTCTAAAGATGT,
(Cannonball (Can), SEQ ID NO: 66)
GCTACAGAGGAATGGCCCAG,
(Cannonball (Can), SEQ ID NO: 67)
GGATCGGGATAACCTGCCGT,
(meiosis I arrest (Mia), SEQ ID NO: 68)
GAGAATCCCCTTGTTGCGGG,
(meiosis I arrest (Mia), SEQ ID NO: 69)
GAGCTCTGACCATCCGCATG,
(P-element induced wimpy testis (PIWI),
SEQ ID NO: 70)
GGTGTTGGACAGCACATCGA,
(P-element induced wimpy testis (PIWI),
SEQ ID NO: 71)
GAGCACACGTGATCGCAAGA,
(Heterochromatin Protein 1e (HP1e), SEQ ID NO: 72)
CAACCTCAAgTTGTaCCAAG,
(Heterochromatin Protein 1e (HP1e), SEQ ID NO: 73)
GGATTATCCAAAACTAAGCA,
(zero population growth (Zpg), SEQ ID NO: 74)
GCAACTGCAAACGCATTCCG,
(zero population growth (Zpg), SEQ ID NO: 75)
GCCCAAGTTGCACCTGCAGG,
(male sterile (3) K81 (K81), SEQ ID NO: 76)
GATCACAGCGAGTTCTTCGG,
male sterile (3) K81 (K81), SEQ ID NO: 77)
GGAGTTGGGGTCGTCGACAT,
(misfire (Mfr), SEQ ID NO: 78)
GGCGTCAAGTTCAAGAAGCA,
(misfire (Mfr), SEQ ID NO: 79)
GAGAACGGGACACTGGCAGG,
(sneaky (Snky), SEQ ID NO: 80)
GACTTCTCGTAGGTGCGCAA,
or
(sneaky (Snky), SEQ ID NO: 81)
GTAGGTGCGCAATGGTAAGA.

[0265] In some embodiments, the targeted sequence required for female-specific viability in Aedes aegypti comprises, or consists essentially of, or yet further consists of a sequence selected from: AGCGACATGCAGCCATTCTG (double sex (Dsx) 1, SEQ ID NO: 87 in the revised plasmid), CTCACAAGTAGAGCTACACG (Dsx2, SEQ ID NO: 88 in the revised plasmid), GGTAGCTGGCCGTTGCCAAA (Dsx3, SEQ ID NO: 89 in the revised plasmid), CTGTCGTCGTTTTTTTCCGG (Dsx4, SEQ ID NO: 90 in the revised plasmid), GGATATTGGTACGACCCGGG (Dsx5, SEQ ID NO: 91), GCGGGATTCGCTCTCGACGA (Intersex1, SEQ ID NO: 58), GGACAACATTTCCAAGGTTA (Intersex2, SEQ ID NO: 59), GCACTAGTGGGATATCCTGA (labrum (Lab) 5, SEQ ID NO: 60), GTCCAGGAAGCATTTGGTAT (labrum (Lab) 4, SEQ ID NO: 61), GTATTCGATGTTCTCCACC (sister of sex lethal (Slx) 4, SEQ ID NO: 92), GAAGGCATATCAAACATTCG (sister of sex lethal (Slx) 5, SEQ ID NO: 93), GTTAAGAACTCGGCCATCGA (homeotic protein Proboscipedia (Pb) 1, SEQ ID NO: 94), GCAAGTTAAGCCTGAAACAA (homeotic protein Proboscipedia (Pb) 2, SEQ ID NO: 95). In another embodiment, the targeted sequence required for male-specific fertility in Aedes aegypti comprises, or consists essentially of, or yet further consists of a sequence selected from: TACTACAACGAGGCTACCGG (Btub1, SEQ ID NO: 96), GTCTCCGCAATACGCCCCGG (Btub2, SEQ ID NO: 97), GATAGGAGCCAAGTTCTGGG (Btub3, SEQ ID NO: 98), CACTATGGATTCGGTCCGAG (Btub4, SEQ ID NO: 99), GTGTAGACTGGCCCTAACGG (zero population growth (Zpg)1, SEQ ID NO: 62), TCTCGTTCCCCAAACACTTG (Zpg2, SEQ ID NO: 63), TCATCAAGAACATGTTCAGG (Zpg3, SEQ ID NO: 64), ACAGTTGGAACCGAACGCTG (Zpg4, SEQ ID NO: 65).

[0266] In some embodiments, the second parental insect comprises, or consists essentially of, or yet further consists of a nucleic acid that encodes an endonuclease under the control of a regulatory sequence that is suitable for directing protein expression in Drosophila suzukii or Aedes aegypti.

[0267] In some embodiments, the regulatory sequence that is suitable for directing protein expression in Drosophila suzukii comprises, or consists essentially of, or yet further consists of a promoter that comprises, or consists essentially of, or yet further consists of a sequence of selected from: nt 4360 to nt 6582 of SEQ ID NO: 1 or nt 4360 to nt 6600 of SEQ ID NO: 2 (874Z promoter sequence), nt 4366 to nt 4873 of SEQ ID NO: 3 (874S promoter sequence), nt 4366 to nt 7196 of SEQ ID NO: 4 (874R promoter sequence), nt 4366 to nt 6233 of SEQ ID NO: 5 (874W promoter sequence), or nt 4360 to nt 5291 of SEQ ID NO: 6 (874Z1 promoter sequence). In one embodiment, the promoter comprises, or consists essentially of, or yet further consists of a sequence of nt 4366 to nt 6233 of SEQ ID NO: 5 (874W promoter sequence).

[0268] In some embodiments, the regulatory sequence suitable for directing protein expression in Aedes aegypti mosquito comprises, or consists essentially of, or yet further consists of a promoter that comprises, or consists essentially of, or yet further consists of a sequence selected from nt 4366 to nt 6497 of SEQ ID NO: 22 (874L promoter sequence), nt 4366 to nt 6865 of SEQ ID NO: 23 or a fragment thereof comprising, or consists essentially of, or yet further consists of an AAEL007097 promoter (874M promoter sequence), nt 4366 to nt 7404 of SEQ ID NO: 24 (874N promoter sequence), nt 4366 to nt 7399 of SEQ ID NO: 25 (874P promoter sequence), or nt 4366 to nt 5751 of SEQ ID NO: 26 (874X promoter sequence), or nt 4366 to nt 4786 of SEQ ID NO: 27 (874Y promoter sequence) or nt 4363 to nt 7162 of SEQ ID NO: 28 (874Y3 promoter sequence). In one embodiment, the promoter comprises, or consists essentially of, or yet further consists of a sequence of nt 4366 to nt 7399 of SEQ ID NO: 25 (874P promoter sequence). In another embodiment, the promoter comprises, or consists essentially of, or yet further consists of a sequence of nt 4366 to nt 4786 of SEQ ID NO: 27 (874Y promoter sequence).

[0269] In yet another aspect, provided is a mating system producing a genetically modified progeny that is a sterile male insect of Drosophila suzukii, comprising, or consists essentially of, or yet further consists of a first parental insect and a second parental insect as disclosed herein. In some embodiments, the first parental Drosophila suzukii comprises, or consists essentially of, or yet further consists of at least one nucleic acid sequence that comprises, or consists essentially of, or yet further consists of: (a) at least a first guide RNA targeting a female essential genomic sequence that is required for female-specific viability in Drosophila suzukii, and (b) at least a second guide RNA targeting a male sterility genomic sequence that is required for male-specific fertility in Drosophila suzukii. In some embodiments, the second parental insect comprises, or consists essentially of, or yet further consists of a nucleic acid that encodes an endonuclease under the control of a regulatory sequence that is suitable for directing protein expression in Drosophila suzukii. In a further embodiment, the regulatory sequence comprises, or consists essentially of, or yet further consists of a promoter selected from a deadhead (Dhd) promoter or a bicoid (BicC) promoter, or any other promoter as disclosed herein.

[0270] In some embodiments, the targeted sequence required for male-specific fertility in Drosophila suzukii is selected from a sequence of Cannonball (Can), meiosis I arrest (Mia), P-element induced wimpy testis (PIWI), Heterochromatin Protein 1e (HP1e), zero population growth (Zpg), male sterile (3) K81 (K81), misfire (Mfr), or sneaky (Snky).

[0271] In some embodiments, the targeted sequence required for female-specific viability in Drosophila suzukii comprises, or consists essentially of, or yet further consists of a sequence of GGCGGCAGCGGCGGGAATGG (Sxl—Max Scott site, SEQ ID NO: 82). In another embodiment, the targeted sequence required for male-specific fertility in Drosophila suzukii comprises, or consists essentially of, or yet further consists of a sequence selected from:

(Btub Original site 2, SEQ ID NO: 83)
TGGCGGTACCGGCTCCGGAA,
(Btub site 2, SEQ ID NO: 84)
CTTGAGTGTGCACCAGCTGG,
(Btub site 3, SEQ ID NO: 85)
CAATGCGGTAACCAGATCGG,
(Btub site 4, SEQ ID NO: 86)
GCCTCGGGGTCTAAAGATGT,
(Cannonball (Can), SEQ ID NO: 66)
GCTACAGAGGAATGGCCCAG,
(Cannonball (Can), SEQ ID NO: 67)
GGATCGGGATAACCTGCCGT,
(meiosis I arrest (Mia), SEQ ID NO: 68)
GAGAATCCCCTTGTTGCGGG,
(meiosis I arrest (Mia), SEQ ID NO: 69)
GAGCTCTGACCATCCGCATG,
(P-element induced wimpy testis (PIWI),
SEQ ID NO: 70)
GGTGTTGGACAGCACATCGA,
(P-element induced wimpy testis (PIWI),
SEQ ID NO: 71)
GAGCACACGTGATCGCAAGA,
(Heterochromatin Protein 1e (HP1e), SEQ ID NO: 72)
CAACCTCAAgTTGTaCCAAG,
(Heterochromatin Protein 1e (HP1e), SEQ ID NO: 73)
GGATTATCCAAAACTAAGCA,
(zero population growth (Zpg), SEQ ID NO: 74)
GCAACTGCAAACGCATTCCG,
(zero population growth (Zpg), SEQ ID NO: 75)
GCCCAAGTTGCACCTGCAGG,
(male sterile (3) K81 (K81), SEQ ID NO: 76)
GATCACAGCGAGTTCTTCGG,
male sterile (3) K81 (K81), SEQ ID NO: 77)
GGAGTTGGGGTCGTCGACAT,
(misfire (Mfr), SEQ ID NO: 78)
GGCGTCAAGTTCAAGAAGCA,
(misfire (Mfr), SEQ ID NO: 79)
GAGAACGGGACACTGGCAGG,
(sneaky (Snky), SEQ ID NO: 80)
GACTTCTCGTAGGTGCGCAA,
or
(sneaky (Snky), SEQ ID NO: 81)
GTAGGTGCGCAATGGTAAGA.

[0272] In some embodiments, the at least one nucleic acid sequence of the first parental Drosophila suzukii comprises, or consists essentially of, or yet further consists of a sequence of GATTGTCAACTACTTGCCCC (Sex lethal (Sxl)—Nikolai site 1, SEQ ID NO: 100).

[0273] In some embodiments, the at least one nucleic acid sequence of the first parental Aedes aegypti comprises, or consists essentially of, or yet further consists of a set of guide RNAs. In one embodiment, the targeted sequences are Dsx1, intersex1, BTub3 and BTub2. In another embodiment, the targeted sequences are Dsx1, Dsx5, BTub3, and BTub2. In yet another embodiment, the targeted sequences are Zpg3, Zpg4, Dsx1, and Dsx1. In one embodiment, the targeted sequences are Btub3, Btub2, Dsx1, and Dsx1. In another embodiment, the targeted sequences are Dsx1, Dsx2, Dsx3, Dsx4, BTub3, and BTub2. In yet another embodiment, the targeted sequences are Dsx1, intersex1, BTub3, BTub2, Dsx2, and Dsx4+.

[0274] In some embodiments, the endonuclease comprises, or consists essentially of, or yet further consists of a CRISPR-associated sequence 9 (Cas9) endonuclease or a variant thereof, a CRISPR-associated sequence 13 (Cas13) endonuclease or a variant thereof, a CRISPR from Prevotella and Francisella 1 (Cpf1) endonuclease or a variant thereof, a CRISPR from Microgenomates and Smithella 1 (Cms1) endonuclease or a variant thereof, or a CRISPR-associated sequence 6 (Cash) endonuclease or a variant thereof.

[0275] In some embodiments, the first insect is a female and the second insect is a male. In another embodiment, the first insect is a male and the second insect is a female. In a further embodiment, either or both of the following of the mating system further comprises, or consists essentially of, or yet further consists of a selection marker: the at least one nucleic acid sequence in the first parental insect or the nucleic acid that encodes an endonuclease under the control of a regulatory sequence of the second parental insect.

[0276] In one aspect, provided is a method of producing a genetically modified progeny that is a sterile male insect of Drosophila suzukii or Aedes aegypti mosquito. The method comprises, or consists essentially of, or yet further consists of genetically crossing two parental insects of the mating system as disclosed herein, and producing and collecting the progeny of the parental insects. In a further embodiment, the method further comprises an introduction step prior to the genetically crossing step, and the introduction step comprises, or consists essentially of, or yet further consists of one or both of the following:
[0277] Introducing the at least one nucleic acid sequence to the first parental insect, or
[0278] Introducing the nucleic acid that encodes an endonuclease under the control of a regulatory sequence to the second parental insect, and
[0279] Optionally wherein either or both of the introduction integrates the sequence into the insect genome, and optionally wherein the progeny comprising, or consisting essentially of, or yet further consists of the endonuclease, at least one first guide RNA, and at least one second guide RNA.

[0280] Additionally provided is a progeny produced by the mating system as disclosed herein, or the method as disclosed herein. In one embodiment, the progeny is an egg, a population of eggs, an insect, or a population of insects. In one embodiment, the progeny may be at any development stage of its life cycle, such as egg, larva or adult. In one embodiment, the progeny is sterile male.

[0281] In one aspect, provided is a progeny of the insect egg or the insect or the insect population or a progeny of each thereof of as disclosed. In a further aspect, one or more of the following is provided: a genetically modified insect egg or a progeny thereof, a genetically modified insect or a progeny thereof, or an insect population comprising, or consists essentially of, or yet further consists of at least one genetically modified insect or a progeny thereof as disclosed herein. In some aspects and/or embodiments of the disclosure herein, the progeny is the first, second, third, fourth, fifth, sixth, seventh, eighth, ninth, tenth, or more generations of the insect egg or insect or insect population.

[0282] In some aspects and/or embodiments of the disclosure herein, the insect egg or the insect or the insect population or a progeny of each thereof of, comprises or consists essentially of, or yet further consists of at least about 50%, or at least about 75%, or at least about 80%, or at least about 85%, or at least about 90%, or at least about 95%, or at least about 96%, or at least about 97%, or at least about 98%, or at least about 99%, or up to 100% of the fitness or the mating competitiveness of a wild type.

[0283] In some aspects and/or embodiments of the disclosure herein, a progeny of the insect egg or the insect or the insect population or a progeny of each thereof as disclosed herein, comprises or consists essentially of, or yet further consists of at least about 80%, or at least about 85%, or at least about 90%, or at least about 95%, or at least about 96%, or at least about 97%, or at least about 98%, or at least about 99%, or up to 100% sterile male.

[0284] Also provided is a method of reducing a wild-type insect population. In one embodiment, the method comprises, or consists essentially of, or yet further consists of introducing an insect egg or an insect or an insect population or a progeny of each thereof as disclosed herein, or the progeny as disclosed herein, to the wild-type insect population. In one embodiment, the insect is Drosophila suzukii. In another embodiment, the insect is Aedes aegypti.

[0285] In another aspect, provided is a polynucleotide comprising, or consisting essentially of, or yet further consisting of a sequence encoding a Cas9 under the control of a deadhead (Dhd) promoter or a bicoid (BicC) promoter or any other promoter as disclosed herein. In one embodiment, the polynucleotide is isolated or engineered. In a further embodiment, the polynucleotide is for use in a mating system as disclosed herein, or a method as disclosed herein.

[0286] Additionally or alternatively, provided is a polynucleotide or a sequence complementary thereto, or reverse thereto, or reverse complementary thereto, or complement thereto, or reverse complement thereto. The polynucleotide comprises, or consists essentially of, or yet further consists of one or both of:
[0287] (a) at least a first guide RNA targeting a female essential genomic sequence that is required for female-specific viability in Drosophila suzukii or Aedes aegypti, and
[0288] (b) at least a second guide RNA targeting a male sterility genomic sequence that is required for male-specific fertility in Drosophila suzukii or Aedes aegypti.

[0289] In one embodiment, the polynucleotide is isolated or engineered.

[0290] In some embodiments, the targeted sequence required for female-specific viability in Aedes aegypti is selected from a sequence of the Intersex or labrum (Lab) gene. In another embodiment, the targeted sequence required for male-specific fertility in Aedes aegypti is a sequence of the zero population growth (Zpg)1 gene. In a further embodiment, the targeted sequence is a sequence in the gene exon, and

[0291] In some embodiments, the targeted sequence required for male-specific fertility in Drosophila suzukii is selected from a sequence of Cannonball (Can), meiosis I arrest (Mia), P-element induced wimpy testis (PIWI), Heterochromatin Protein 1e (HP1e), zero population growth (Zpg), male sterile (3) K81 (K81), misfire (Mfr), or sneaky (Snky). In a further embodiment, the targeted sequence is a sequence in the gene exon. In yet a further embodiment, the polynucleotide is for use in a mating system as disclosed herein, or a method as disclosed herein.

[0292] Additionally provided is a polynucleotide or a sequence complementary thereto. Such polynucleotide comprises, or consists essentially of, or yet further consists of one or both of:
[0293] (a) a first guide RNA targeting a female essential genomic sequence that is required for female-specific viability in Drosophila suzukii or Aedes aegypti, and
[0294] (b) a second guide RNA targeting a male sterility genomic sequence that is required for male-specific fertility in Drosophila suzukii or Aedes aegypti.

[0295] In one embodiment, the polynucleotide is isolated or engineered.

[0296] In some embodiments, the targeted sequence required for female-specific viability in Drosophila suzukii is GGCGGCAGCGGCGGGAATGG (Sxl—Max Scott site, SEQ ID NO: 82). In another embodiment, the targeted sequence required for male-specific fertility in Drosophila suzukii comprises, or consists essentially of, or yet further consists of a sequence selected from: TGGCGGTACCGGCTCCGGAA (Btub Original site 2, SEQ ID NO: 83), CTTGAGTGTGCACCAGCTGG (Btub site 2, SEQ ID NO: 84), CAATGCGGTAACCAGATCGG (Btub site 3, SEQ ID NO: 85), GCCTCGGGGTCTAAAGATGT (Btub site 4, SEQ ID NO: 86), GCTACAGAGGAATGGCCCAG (Cannonball (Can), SEQ ID NO: 66), GGATCGGGATAACCTGCCGT (Cannonball (Can), SEQ ID NO: 67), GAGAATCCCCTTGTTGCGGG (meiosis I arrest (Mia), SEQ ID NO: 68), GAGCTCTGACCATCCGCATG (meiosis I arrest (Mia), SEQ ID NO: 69), GGTGTTGGACAGCACATCGA (P-element induced wimpy testis (PIWI), SEQ ID NO: 70), GAGCACACGTGATCGCAAGA (P-element induced wimpy testis (PIWI), SEQ ID NO: 71), CAACCTCAAgTTGTaCCAAG (Heterochromatin Protein 1e (HP1e), SEQ ID NO: 72), GGATTATCCAAAACTAAGCA (Heterochromatin Protein 1e (HP1e), SEQ ID NO: 73), GCAACTGCAAACGCATTCCG (zero population growth (Zpg), SEQ ID NO: 74), GCCCAAGTTGCACCTGCAGG (zero population growth (Zpg), SEQ ID NO: 75), GATCACAGCGAGTTCTTCGG (male sterile (3) K81 (K81), SEQ ID NO: 76), GGAGTTGGGGTCGTCGACAT male sterile (3) K81 (K81), SEQ ID NO: 77), GGCGTCAAGTTCAAGAAGCA (misfire (Mfr), SEQ ID NO: 78), GAGAACGGGACACTGGCAGG (misfire (Mfr), SEQ ID NO: 79), GACTTCTCGTAGGTGCGCAA (sneaky (Snky), SEQ ID NO: 80), or GTAGGTGCGCAATGGTAAGA (sneaky (Snky), SEQ ID NO: 81), and

[0297] In some embodiments, the targeted sequence required for female-specific viability in Aedes aegypti comprises, or consists essentially of, or yet further consists of a sequence selected from: AGCGACATGCAGCCATTCTG (double sex (Dsx) 1, SEQ ID NO: 87 in the revised plasmid), CTCACAAGTAGAGCTACACG (Dsx2, SEQ ID NO: 88 in the revised plasmid), GGTAGCTGGCCGTTGCCAAA (Dsx3, SEQ ID NO: 89 in the revised plasmid), CTGTCGTCGTTTTTTTCCGG (Dsx4, SEQ ID NO: 90 in the revised plasmid), GGATATTGGTACGACCCGGG (Dsx5, SEQ ID NO: 91), GCGGGATTCGCTCTCGACGA (Intersex1, SEQ ID NO: 58), GGACAACATTTCCAAGGTTA (Intersex2, SEQ ID NO: 59), GCACTAGTGGGATATCCTGA (labrum (Lab) 5, SEQ ID NO: 60), GTCCAGGAAGCATTTGGTAT (labrum (Lab) 4, SEQ ID NO: 61), GTATTCGATGTTCTCCACC (sister of sex lethal (Slx) 4, SEQ ID NO: 92), GAAGGCATATCAAACATTCG (sister of sex lethal (Slx) 5, SEQ ID NO: 93), GTTAAGAACTCGGCCATCGA (homeotic protein Proboscipedia (Pb) 1, SEQ ID NO: 94), GCAAGTTAAGCCTGAAACAA (homeotic protein Proboscipedia (Pb) 2, SEQ ID NO: 95), or wherein the targeted sequence required for male-specific fertility in Aedes aegypti is selected from: TACTACAACGAGGCTACCGG (Btub1, SEQ ID NO: 96), GTCTCCGCAATACGCCCCGG (Btub2, SEQ ID NO: 97), GATAGGAGCCAAGTTCTGGG (Btub3, SEQ ID NO: 98), CACTATGGATTCGGTCCGAG (Btub4, SEQ ID NO: 99), GTGTAGACTGGCCCTAACGG (zero population growth (Zpg)1, SEQ ID NO: 62), TCTCGTTCCCCAAACACTTG (Zpg2, SEQ ID NO: 63), TCATCAAGAACATGTTCAGG (Zpg3, SEQ ID NO: 64), ACAGTTGGAACCGAACGCTG (Zpg4, SEQ ID NO: 65);

[0298] In one embodiment, the polynucleotide is for use in a mating system as disclosed herein, or a method as disclosed herein.

[0299] In one aspect, provided is a vector comprising, or alternatively consisting essentially of, or yet further consisting of one or more of the polynucleotide(s) as disclosed herein. In one embodiment, provided is a vector comprising, or consisting essentially of, or yet further consisting of a polynucleotide as disclosed herein or its complement or an equivalent of each thereof. Such equivalent hybridize to the same targeted sequence or encodes the same protein. In one embodiment, a polynucleotide or a vector as provided herein may further comprises another sequence, such as one or more of a sequence listed as a feature in the drawings. Non-limiting examples of the sequence that may be further comprised include a sequence encoding a detectable marker (such as nt 6430 to nt 7146 of SEQ ID NO: 20 encoding an enhanced GFP having an amino acid sequence of SEQ ID NO: 14), a regulatory sequence (such as a promoter, a terminator, a polyA, an enhancer, or an intron), a polynucleotide sequence of a nuclear localization sequence or a polynucleotide sequence encoding a nuclear localization peptide (both of which are referred to herein as NLS) optionally located at the 5′ end of the sequence encoding a protein (such as Cas9 or a protein detectable marker), a polynucleotide sequence encoding a self-cleaving peptide (such as T2A) and/or any other cleavage site (such as a glycine-Proline cleavage site) optionally located at the 5′ end of the sequence encoding a detectable marker, or a gRNA scaffold located at the 3′ end of gRNA (such as nt 4514 to nt 4589 of SEQ ID NO: 17 or nt 5083 to nt 5168 of SEQ ID NO: 44).

[0300] In a further embodiment, the vector is selected from the group of 874Z, 874S, 874R, 874W, 874Z1, 874L, 874M, 874N, 874P, 874X, 874Y, 874Y3, 1056C.2, 1056H, 1056I, 1056J, 1056K, 1104D, 1104E, 1104H, 1104I, 1104J, 1104K, 1104M, 1104N, 1055A, 1055B, 1055C, 1055D, 10555E, 1055F, 1055I, 1055T, 1055Y, 1055Z, 1067A, 1067B, 1067C, 1067D, 1067E, 1067F, 1067G, 1067H, or 1067L. In yet a further embodiment, the vector is for use in the method as disclosed herein.

[0301] Also provided is an isolated or engineered host cell comprising any one or more of the polynucleotides as disclosed herein and/or any one or more of the vectors as disclosed herein. In one embodiment, the host cell produces the polynucleotide(s) and/or the vector(s). Additionally or alternatively, the host cell is an insect cell. In one embodiment, the host cell is selected from an egg, a sperm, a zygote, or a germline cell. In yet a further embodiment, the cell is an insect germline cell. In a further embodiment, the cell is a Drosophila suzukii or Aedes aegypti mosquito cell. Additionally or alternatively, the progeny may be at any development stage of its life cycle, such as egg, larva or adult.

[0302] In some embodiments, the polynucleotide is engineered to one or more of the chromosome(s) or chromosome sites of the host cell. In one embodiment, the host cell comprises homozygous polynucleotides. In another embodiment, the host cell comprises a heterozygous polynucleotide. In some aspects and/or embodiments of the disclosure herein, the polynucleotide is engineered to one or more of the chromosome(s) or chromosome site(s) of the insect egg or the insect.

[0303] In another aspect, provided is a Drosophila suzukii or Aedes aegypti mosquito comprising any one or more of: a polynucleotide as disclosed herein, a vector as disclosed herein, or a cell as disclosed herein.

[0304] In yet another aspect, provided is a kit comprising, or consisting essentially of, or yet further consisting of one or more of: a polynucleotide as disclosed herein, a vector as disclosed herein, a cell as disclosed herein, or A Drosophila suzukii or Aedes aegypti mosquito as disclosed herein.

[0305] In some aspects and/or embodiments of the disclosure herein, the cell is an insect cell. In one embodiment, the host cell is selected from an egg, a sperm, a zygote, or a germline cell. In one embodiment, the progeny is an egg, a population of eggs, an insect, or a population of insects. In one embodiment, the progeny may be at any development stage of its life cycle, such as egg, larva or adult.

[0306] In some aspects and/or embodiments of the disclosure herein and unless specified, the insect is Drosophila suzukii. In some aspects and/or embodiments of the disclosure herein and unless specified, the insect is Aedes aegypti.

[0307] In some aspects and/or embodiments of the disclosure herein, the regulatory sequences directing expression of a gRNA comprises or consists essentially of, or yet further consists of a RNA pol III promoter. In a further embodiment, the RNA pol II promoter is selected from the group consisting of H1, U6, and U6.3.

[0308] In some aspects and/or embodiments of the disclosure herein, any of the composition as disclosed herein, such as a polynucleotide, a vector, a cell, or a Drosophila suzukii or Aedes aegypti mosquito may further comprises a detectable or selectable marker.

[0309] The following examples are included to demonstrate some embodiments of the disclosure. However, those of skill in the art should, in light of the present disclosure, appreciate that many changes can be made in the specific embodiments which are disclosed and still obtain a like or similar result without departing from the spirit and scope of the invention.

### Examples

[0310] Experiment No. 1—Precision Guided Sterile Insect Technique to Control a Major Worldwide Human Disease Vector, Aedes aegypti

[0311] In D. melanogaster, it was demonstrated that a ubiquitously expressed or maternally deposited Cas9 endonuclease guided by a specific gRNA can efficiently mutate a target gene locus in both somatic and germ cells and cause the loss-of-function phenotype in 100% of F₁ progeny. To apply this highly efficient Cas9/gRNA-directed cleavage for the precision guided SIT (pgSIT), applicant decided to maintain a Cas9 endonuclease and a gRNA as separate component line of the CRISPR/Cas9 system and cross them when the loss-of-function phenotype is required (FIG. 1A). The gRNA line was designed to express two independent gRNAs: one to cause female lethality and the other to induce male sterility. The Cas9 line expressed the Cas9 endonuclease either ubiquitously or just in the germline. Both lines were continuously propagated and healthily expanded separately in the laboratory, while their mutual progeny developed into fit sterile males (WO 2019/103982, Kandul et al. 2018 and Kandul et al. 2019). Applicant demonstrated 100%±0% heritable cleavage of the white gene in Ae. aegypti when optimized under the expression of two separate promoters (nup50-Cas9, uniq-Cas9) and similar high cleavage rates have also been obtained in D. melanogaster (Port et al. 2014; Bassett and Liu 2014) and A. aegypti (M. Li et al. 2017) in other studies. Furthermore, through a mechanism called lethal biallelic mosaicism (LBM), 100% sterile male phenotypes are achieved even though the allelic conversion in the whole organism was less than 100% (WO 2019/103982, Kandul et al. 2018 and Kandul et al. 2019).

Lethal Biallelic Mocaisism Ensures 100% Efficiency of pgSIT Technology

[0312] As described above, pgSIT relies exclusively on highly efficient CRISPR-mediated DNA cleavage and NHEJ-based repair to cause mosaic mutations (aka. indels) at conserved loci to achieve a full loss-of-function (sterile male) phenotype. The pgSIT system built in D. melanogaster demonstrated that zygotic activity of the Cas9/gRNA complexes ensures continuous biallelic mosaicism of targeted alleles throughout development and when engineered to target female essential genes and male fertility genes resulted in complete and consistent sterile male phenotypes (WO 2019/103982, Kandul et al. 2019 and Kandul et al. 2018). Moreover, paternal inheritance of dgRNAs along with maternal deposition of Cas9 in developing embryos, in the absence of Cas9 inherited as a gene, was also sufficient to induce detectable biallelic mosaicism for all genes targeted (βTub, dsx, tra, sxl). For example, maternal deposition of Cas9 alone was sufficient to induce intersex phenotypes (dsx, tra), however it was insufficient to phenotypically ensure male sterility (βTub), and depended on the strength of the promoter maternally depositing Cas9 to ensure female death (sxl) via lethal biallelic mosaicism (WO 2019/103982, Kandul et al. 2019 and Kandul et al. 2018). Taken together, these observations suggest that rates of biallelic mosaicism, which ensure the desired phenotype, depend exclusively on whether components (i.e. Cas9 and gRNA) are inherited as genes or maternally deposited.

[0313] Further, the diversity of promoters and genetic elements in the disclosed toolbox allows us to achieve strong, consistent and timely expression of these components in Ae. aegypti and with further development, other vectors. Additionally, regardless of how the components are inherited, if rates of biallelic mosaicism are over a critical threshold, which is specific to each gene targeted, then by targeting a female essential gene and male fertility, a 100% male sterile phenotype was achieved. Mechanistically, this technology demonstrates a fundamental advance in genetics by which somatic biallelic disruptions in essential genes, that previously conferred recessive phenotypes, get simultaneously converted by pgSIT in many somatic cells resulting in dominant fully penetrant phenotypes in a single generation (WO 2019/103982, Kandul et al. 2019 and Kandul et al. 2018).

[0314] General Experimental Approach

[0315] Applicant applied novel genetic sexing and pgSIT technologies to disease vector species, specifically the primary vector of dengue and Zika virus, Ae. aegypti and then adapt this technology to another vector. In preliminary experiments, applicant created six Ae. aegypti lines which endogenously express Cas9 (AaCas9). These AaCas9 lines were shown to facilitate the efficient knock-out of multiple genes when co-injected with short-guide RNAs (sgRNAs) (M. Li et al. 2017) (FIG. 7). These genes were knocked out as single, double or triple mutants making these lines amenable the multi-knock out system disclosed herein. Additional gene disruption experiments with genes known to have other visible phenotypes: ebony, deformed, vestigial, and sine oculus, further demonstrates the robustness of this approach (M. Li et al. 2017). These experiments demonstrate that applicant can generate fit, healthy, homozygous viable and efficient Cas9 strains in Ae. aegypti and applicant can use these strains to target and disrupt more than one gene at a time—a very important prerequisite for the pgSIT systems as disclosed herein. Furthermore, this technology can be edited and adapted for any transgenic competent insect. The resulting technology could revolutionize the field of vector control and mass production of sterile mosquito males to release for suppression of vector-borne diseases worldwide by shipping eggs to remote locations (FIG. 5). This technology is expanded by creating Ae. aegypti lines which express gRNAs to target female essential genes and male fertility genes and then demonstrate that this technology can be scaled and adapted to other mosquito species.

### Engineering Female Lethality

[0316] To kill all female progeny, any female essential gene can be targeted with the disclosed approach. As proof of principle gRNAs were used targeting key female-specific sex determination genes in D. melanogaster (WO 2019/103982, Kandul et al. 2018 and Kandul et al. 2019). Applicant targeted female essential genes including sex-specific alternatively spliced sex-determination genes including sex lethal (Sxl, sgRNA^{Sxl}), transformer (tra, sgRNA^{Tra}), or the highly conserved doublesex (dsxF, sgRNA^{DsxF}) gene (WO 2019/103982, Kandul et al. 2018 and Kandul et al. 2019). Sex determination in insects is an evolutionarily conserved phenomenon requiring key-regulatory genes: sxl, tra, and dsx (Sanchez 2008; Price, Egizi, and Fonseca 2015b; Bopp, Saccone, and Beye 2014). In Drosophila, sex-specific alternative splicing of sxl induces a splicing cascade of the downstream tra and dsx genes leading to production of female and male specific versions of Dsx proteins (dsx^{F} and dsx^{M}) that cause further activation of sex-specific genes. Notably, the cues that initiate a sex-specific alternative splicing of sxl may vary, even in related insects, while the core sex-determination pathway, sxl, tra, and dsx, are highly conserved among insects and other invertebrates. In Ae. aegypti, a dominant male-determining factor (Nix) activates male specific splicing of the same key genes (Hall et al. 2015); therefore it is highly likely that similar results can be achieved in this species. Transient knockdown of the dsx in Ae. aegypti during blood feeding resulted in reduced fertility in male offspring (Whyard et al. 2015). The dsx gene has also been linked to male fertility in other mosquito vector species (Price, Egizi, and Fonseca 2015a; Scali et al. 2005), so this gene may be a suitable target across many vector species. In fact, a recent study demonstrated that dsx knockouts in Anopheles gambiae could consistently generate sterile or intersex females (Kyrou et al. 2018). However, while there are many similarities between the D. melanogaster and Ae. aegypti sex determination pathways, their differences will warrant examination of multiple candidate female lethality genes. For example, the tra homologue, required for fruitless (fru), a sex-linked behavior gene, is not present in Ae. aegypti, but transformer 2 (tra-2), a member of the transformer splicing complex, is present (Salvemini et al. 2013; Nene et al. 2007). In fact, tra-2 knock down in tephritid flies causes masculinization of females (Sarno et al. 2010), while transient knock-down of tra-2 in Ae. aegypti caused female lethality (Hoang et al. 2016). Moreover, the Ae. aegypti dsx and fru orthologous have sex specific splicing (Salvemini et al. 2013, 2011). Therefore, tra-2 and potentially dsx are excellent candidates for the approach, but they need to be evaluated along with other potential genes. Finally, many D. melanogaster genes that conserved in Ae. aegypti have interesting female-specific loss-of-function phenotypes; for example, hermaphrodite, intersex, virilizer, and etc. These genes can also be tested one gene, or multiple genes, at the time to cause Ae. aegypti female-specific lethality or masculinization.

### Engineering Male Sterility

[0317] In the pgSIT, any male fertility gene can be targeted to create sterile male progeny. In the proof of concept studies conducted with D. melanogaster, gRNAs to disrupt male fertility were designed, including genes active during spermatogenesis, such as βTubulin 85D (βTub, sgRNA^{βTub}), fuzzy onions (fzo, sgRNA^{Fzo}), protamine A (ProtA, sgRNA^{ProtA}), or spermatocyte arrest (sa, sgRNA^{Sa}). Many of these genes a have homolog in Ae. aegypti. Crosses between Cas9 expression lines with nanos promoters to lines targeting the βTub gene (gRNAβTubulin and Sxl) resulted in 100% sterile male progeny (WO 2019/103982, Kandul et al. 2018 and Kandul et al. 2019). Notably, sterile males resulting from SIT technologies are only effective if they can competitively court and mate with females, and the compromised fitness of sterile males generated by a classic SIT has been the weakest point of this technology. Without wishing to be bound by the theory, because a single gene required only for later spermatid maturation was mutated, the fitness of pgSIT sterile males were not be significantly reduced. Indeed, applicant found that the pgSIT-generated males were able to compete effectively for mates with wt counterparts and survive as long or longer that wt males (WO 2019/103982, Kandul et al. 2018 and Kandul et al. 2019).

[0318] Relating to the translation of the precision-guided sterile insect technique (pgSIT), developed for Drosophila melanogaster (Kandul et al. 2019), to other species, in particular Aedes aegypti. A number of assumptions were made by Kandul et al. 2019 in extending the implications of the findings to other species. Here, applicant explored the implications of less generous assumptions regarding the field performance of pgSIT in Ae. aegypti, and confirmed that it is still a competitive technology under these conditions. Applicant also clarified logistical concerns regarding the distribution of eggs, sex sorting of adults, and the potential for mutations to occur that could disrupt field implementation.

[0319] In Kandul et al. 2019, for the simulations of releases of insects carrying a dominant lethal (RIDL) and female-specific RIDL (fsRIDL), the mating competitiveness parameter was taken from the field performance of an Ae. aegypti RIDL strain (Carvalho et al. 2015 and Harris et al. 2011); whereas for pgSIT, it was taken from the lab performance of a D. melanogaster strain. Further investigation was performed. In the absence of field data for pgSIT, Applicant repeated the pgSIT simulations with the mating competitiveness parameter used for RIDL, in which released adult males having the construct had their mating competitiveness reduced by 95% as compared to wild males in the field (Carvalho et al. 2015 and Harris et al. 2011). Results from these simulations suggest a very similar performance between pgSIT and fsRIDL when identical parameters are used (FIG. 54). Without wishing to be bound by the theory, this finding may be explained as both are self-limiting population suppression technologies that involve releases at the egg stage.

[0320] Further several lines of evidence suggest that parameters estimated for the MDL system may be conservative for the pgSIT system, and hence that pgSIT may have a greater potential to eliminate local Ae. aegypti populations than current published versions of the MDL system. First, applicant used a conservative estimate of an 18% lifespan reduction associated with the pgSIT construct, based on an estimate for the MDL system in the lab (Massonnet-Bruneel et al. 2013), despite measuring a lifespan increase associated with the pgSIT system in D. melanogaster (FIG. 4c of Kandul et al. 2019). The cause of this still needs to be investigated; however it displays the opposite trend as that seen for RIDL in Ae. aegypti. Second, the fitness of MDL mosquitoes is likely impacted by tetracycline exposure and leaky toxin expression of the dominant lethal gene—two factors that do not affect the pgSIT system. That said, there may be unforeseen fitness consequences of the pgSIT system in Ae. aegypti.

[0321] Relating to the logistics of pgSIT field implementation for Ae. aegypti: i) sex sorting of adults to produce pgSIT eggs, ii) distribution of eggs in the environment and survival to the adult stage, and iii) dispersal and mixing of pgSIT adults with wild mosquitoes. First, regarding sex sorting, without wishing to be bound by the theory, this is not to be an issue given the precent set by the Debug Project of Verily who routinely and efficiently sort female and male mosquitoes with 99.99% accuracy. This readily-available sex-sorting technology enables the separation of adult females and males from both strains to generate pgSIT eggs in quantities sufficient for wide-scale field implementation. Second, regarding egg distribution and survival, despite the difficulty of distributing eggs to small containers and breeding sites in the environment (Bouyer et al. 2019), the disclosure enables releases of pgSIT eggs into defined, artificial breeding containers in the field so that mosquitoes may then emerge into the environment with high yield survival from egg to adult. Third, regarding mixing of pgSIT males with wild mosquitoes, these artificial breeding containers would be placed carefully to ensure adequate mixing with the wild mosquito population. If the technology proceeds to field implementation, preliminary ecological assessments would be carried out at field sites, along with mathematical modeling, to design release schemes that would address this concern.

[0322] Third, relating to the potential for mutations to occur that could inactivate the Cas9 or gRNA cassettes, as a byproduct of mass rearing millions of insects on a weekly basis. It is true that mutations may occur that inactivate the pgSIT system, however these are unlikely to be detrimental to field implementation. By comparison, RIDL technology has been successfully implemented in the field despite being likely impacted more frequently by mutations that inactivate the system due to basal expression of the VP16 toxin that ecodes dominant lethality, whereas pgSIT is a binary system and is inactive until crossed. That said; assays for detecting inactive pgSIT mutants would be developed as part of the factory protocol.

[0323] Fourth, regarding to releasing eggs is not an option for insect pests such as the fruit fly, as disclosed herein applicant is actively building pgSIT in the fruit fly Drosophila suzukii, a major crop pest that lays eggs in fruit, and have plans to deploy eggs by releasing artificial food substrate in which they have been laid. Finally, in terms of regulatory limitations, without wishing to be bound by the theory, pgSIT would be regulated in a similar category to comparable insect technologies (e.g. RIDL), which has been approved for release in many countries and is being used in the field today. The pgSIT system in D. melanogaster are highly encouraging for application to other species, in particular Ae. aegypti, but also including several insect agricultural crop pests. The disclosure herein addressed the need for further lab and field studies to demonstrate the performance of the system in these species as required by Kandul et al. 2019.

### Construction of Plasmids—Cloning Vectors 1055

[0324] Dual-U6-gRNAs (such as, Vector 1055A˜1055F) were designed and constructed. Briefly, Vector 1051v3 was cut with BmtI-HF and PmeI (CutSmart 37° C., 1548 bp drop-off, 8.8 Kb backbone) and Onestep GenPartA-F was applied respectively to make Vector 1055A-1055F.

[0325] Another example is Vector 1055T-pBac-U6(AAEL017774)-sgPb1-LongScaffold-3′UTR-U6(AAEL017763)-sgPb2-LongScaffold-3′UTR-3xp3-tdTomato. It was constructed via cutting Vector 1051v3 with BmtI-HF and PmeI (CutSmart 37° C., 1548 bp drop-off, 8.8 Kb backbone), performing PCR of sgPb1-LongScaffold-3′UTR-U6(AAEL017763)-sgPb2 with primers 1055T.C1/C2 from 1051.v3 (1627 bp) and conducting Onestep according to the manufacturer protocol. For diagnostic, restriction enzymes PacI/AscI/PmeI (1.5 Kb+8.9 Kb) were used and 1051.v3 is a control (0.6 Kb+0.85 Kb+8.9 Kb).

[0326] Additionally, Vector 1055Y-pBac-U6(AAEL017774)-sgLab5-U6(AAEL017763)-sgLab4-LongScaffold-3′UTR-3xp3-tdTomato was constructed via cutting Vector 1051v3 with BmtI-HF and PmeI (CutSmart 37° C., 1548 bp drop-off, 8.8 Kb backbone), performing PCR of sgMHC3-LongScaffold-3′UTR-U6(AAEL017763)-sgMHC4 with primers 1055Y.C1/C2 from 1051.v3 (1627 bp) at 61° C. and conducting Onestep reaction according to the manufacturer protocol. For diagnostic, restriction enzymes PacI/AscI/PmeI (1.5 Kb+8.9 Kb) were used and 1051.v3 performed as a control (0.6 Kb+0.85 Kb+8.9 Kb).

[0327] Relating to constructing Vector 1055Z-pBac-U6(AAEL017774)-sgSlx4-U6(AAEL017763)-sgSlx5-LongScaffold-3′UTR-3xp3-tdTomato, Vector 1051v3 was cut with BmtI-HF and PmeI (CutSmart 37° C., 1548 bp drop-off, 8.8 Kb backbone). PCR reaction was performed on sgMHC3-LongScaffold-3′UTR-U6(AAEL017763)-sgMHC4 with primers 1055Z.C1/C2 from 1051.v3 (1627 bp) at 61° C., followed by Onestep reaction conducted according to the manufacturer protocol. For diagnostic, restriction enzymes PacI/AscI/PmeI (1.5 Kb+8.9 Kb) were used while 1051.v3 performed as a control (0.6 Kb+0.85 Kb+8.9 Kb).

[0328] Sequencing of the constructed vectors was also performed for verification purpose.

### Construction of Plasmids—Cloning Vectors 1067

[0329] Quad-U6-gRNAs were designed and constructed. For example, Vector 1067A-pBac-U6(AAEL017774)-sgBTub1-U6(AAEL017763)-sgBTub2-U6(AAEL017774)-sgBTub3-U6(AAEL017763)-sgBTub4-LongScaffold-3′UTR-3xp3-tdTomato-v3 was constructed via cutting Vector 1055B with BglII (NEBuffer 3.1, 37° C., no drop-off, 10.4 Kb backbone) a. CIP/Ant. Phosphatase, PCRing Dual-U6-gRNAs with 1067C1/1067C2 from 1055A (3249 bp) and conducting Onestep reaction conducted according to the manufacturer protocol.

[0330] Vector 1067B-pBac-U6(AAEL017774)-sgDsx1-U6(AAEL017763)-sgDsx2-U6(AAEL017774)-sgDsx3-U6(AAEL017763)-sgDsx4-LongScaffold-3′UTR-3xp3-tdTomato-v3 was constructed via cutting Vector 1055D with BglII (NEBuffer 3.1, 37° C., no drop-off, 10.4 Kb backbone) a. CIP/Ant. Phosphatase; PCRing Dual-U6-gRNAs with 1067C1/1067C2 from 1055C (3249 bp); and Onestep.

[0331] Vector 1067C-pBac-U6(AAEL017774)-sgZpg1-U6(AAEL017763)-sgZpg2-U6(AAEL017774)-sgZpg3-U6(AAEL017763)-sgZpg4-LongScaffold-3′UTR-3xp3-tdTomato-v3 was constructed via cutting Vector 1055F with BglII (NEBuffer 3.1, 37° C., no drop-off, 10.4 Kb backbone) a. CIP/Ant. Phosphatase; PCRing Dual-U6-gRNAs with 1067C1/1067C2 from 1055E (3249 bp); and Onestep.

[0332] Vector 1067D-pBac-U6(AAEL017774)-sgDsx1-U6(AAEL017774)-sgIsx1-U6(AAEL017774)-sgBTub3-U6(AAEL017763)-sgBTub2-LongScaffold-3′UTR-3xp3-tdTomato was constructed via cutting Vector 1055CJ with ApaI and AscI (Digest in CutSmart at 25° C. with ApaI, then add AscI and raise temperature to 37° C., no dropoff, 10.4 Kb backbone); PCRing U6(AAEL017774)-sgBTub3-U6(AAEL017763)-sgBTub2 with 1067C3/1067C4 from 1055BA (3230 bp); cutting PCR product with ApaI and AscI (Digest in CutSmart at 25° C. with ApaI, then add AscI and raise temperature to 37° C., keep 3199 bp); and subcloning. For diagnostic, restriction enzymes ApaI/AscI (3.4 Kb+10.4 Kb) were used, while 1055BA performed as control (10.4 Kb).

[0333] Vector 1067E-pBac-U6(AAEL017774)-sgDsx1-U6(AAEL017774)-sgDsx5-U6(AAEL017774)-sgBTub3-U6(AAEL017763)-sgBTub2-LongScaffold-3′UTR-3xp3-tdTomato was constructed via cutting Vector 1055C1 with ApaI and AscI (Digest in CutSmart at 25° C. with ApaI, then add AscI and raise temperature to 37° C., no dropoff, 10.4 Kb backbone); PCRing U6(AAEL017774)-sgBTub3-U6(AAEL017763)-sgBTub2 with 1067C3/1067C4 from 1055BA (3230 bp); cutting PCR product with ApaI and AscI (Digest in CutSmart at 25° C. with ApaI, then add AscI and raise temperature to 37° C., keep 3199 bp); and subcloning. For diagnostic, restriction enzymes ApaI/AscI (3.4 Kb+10.4 Kb) were used, while 1055C1 and 1055BA served as control (10.4 Kb).

[0334] Vector 1067F.v3-pBac-U6(AAEL017774)-sgBTub3-U6(AAEL017763)-sgBTub2-LongScaffold-3′UTR-3xp3-tdTomato-U6(AAEL017774)-sgDsx1-U6(AAEL017763)-sgDsx1 was constructed via cutting Vector 1055BA with FseI (Stored at −80° C., Digest in CutSmart at 37° C., no dropoff, 10.4 Kb backbone), followed by CIP; PCRing U6(AAEL017774)-sgDsx1-U6(AAEL017763)-sgDsx1 with 1067C5/1067C6 from 1055C2 (3238 bp); and onestep. For diagnostic, restriction enzymes BmtI (or NheI) and PmeI (3.2 Kb+10.4 Kb) were used.

[0335] Vector 1067G-pBac-U6(AAEL017774)-sgZpg3-U6(AAEL017763)-sgZpg4-LongScaffold-3′UTR-3xp3-tdTomato-U6(AAEL017774)-sgDsx1-U6(AAEL017763)-sgDsx1 was constructed via cutting Vector 1055F with FseI (Stored at −80° C., Digest in CutSmart at 37° C., no dropoff, 10.4 Kb backbone), followed by CIP; PCRing U6(AAEL017774)-sgDsx1-U6(AAEL017763)-sgDsx1 with 1067C5/1067C6 from 1055C2 (3238 bp); and onestep. For diagnostic, restriction enzymes BmtI (or NheI) and PmeI (3.2 Kb+10.4 Kb) were used.

[0336] Vector 1067H-pBac-U6(AAEL017774)-sgDsx1-U6(AAEL017763)-sgDsx2-U6(AAEL017774)-sgDsx3-U6(AAEL017763)-sgDsx4-LongScaffold-3′UTR-3xp3-tdTomato-v3-U6(AAEL017774)-sgBTub3-U6(AAEL017763)-sgBTub2 was constructed via cutting Vector 1067B with FseI (Stored at −80° C., Digest in CutSmart at 37° C., no dropoff, 13.6 Kb backbone), followed by CIP; PCRing U6(AAEL017774)-sgBTub3-U6(AAEL017763)-sgBTub2 with 1067C5/1067C6 from 1055BA (3238 bp); and onestep. For diagnostic, restriction enzymes BmtI (or NheI) (5.2 Kb+11.6 Kb) were used, while 1067B served as control (linear 13.6 Kb).

[0337] Sequencing of the constructed vectors was also performed for verification purpose.

Generation of Sterile Males in F Progeny—Development of 100% Sterile Males from Cas9 and Dual Female Viability and Male Fertility Deficient gRNA Crosses:

[0338] The goal of pgSIT is to disrupt genes essential for male fertility/female viability simultaneously to ensure that all surviving F₁ offspring are sterile males. To achieve this feat, applicant generated three homozygous strains expressing multiplexed double gRNA (dgRNA) combinations, including dgRNA^{βTub,Sxl}, dgRNA^{βTub,Tra}, and dgRNA^{βTub,DsxF}. To genetically assess the activity of these pgSIT strains, Applicant bidirectionally crossed each line to wt, or homozygous Cas9 (either nos-Cas9, vas-Cas9, or Ubi-Cas9) (WO 2019/103982, Kandul et al. 2018 and Kandul et al. 2019). As expected, the WT crosses produced no significant gender deviations or compromised fertility. Interestingly however, the crosses between dgRNA^{βTub,Sxl} with each Cas9 strain resulted in 100% female lethality due to disruption of sxl, in addition to 100% male sterility due to simultaneous disruption of βTub (n=2521, N=24). Moreover, 100% of females from crosses between each Cas9 strain and dgRNA^{βTub,Tra} (n=1697, N=24) or dgRNA^{βTub,DsxF} (n=1791, N=24) were masculinized into sterile intersexes due to disruption of either tra or dsx, and 100% male offspring were sterile due to simultaneous disruption of βTub (n=4231, N=48). These findings demonstrate that the ability to form highly active Cas9-gRNA complexes was not saturated by dgRNAs and the pgSIT approach works reproducibly with unprecedented efficiency (WO 2019/103982, Kandul et al. (2018) and Kandul et al. (2019)). Targets listed as disclosed herein as well as the constructed vectors are tested.

### Experiment No. 2—Precision Guided Sterile Insect Technique to Control Drosophila Suzukii.

### Construction of Plasmids—Cloning Vectors 1056

[0339] 1056C.2 (HL-U6:3-sxl2-gRNA-UTR-opie-mVenus-SV40-U6:3-sxl1-gRNA-UTR-HR) was constructed via cutting 1056C with PacI and AflII (CutSmart 37° C., 1.5 Kb dropout); PCRing opie-mVenus-SV40 with primers 1056C.C5/1056C.C6 from 1056.X (Tm 55C, 1.5 kb) and Onestep.

[0340] 1056H (HL-U6:3-sxl2-gRNA-UTR-opie-mVenus-SV40-U6:3-sxl1-gRNA-UTR-HR-U6-Btub1-UTR) was constructed via cutting 1056C.2 with AscI+AvrII (CutSmart 37° C., no dropout); PCRing U63 promoter from vector 1056X with primers 1056H.C1/1056H.C2 (477 bp, 60-65° C.); PCRing scaffold-UTR- from vector 1056X with primers 1056H.C3/1056H.C4 (2340 bp, 50˜55° C.); and Onestep.

1056H.C1:
(SEQ ID NO: 48)
CGCTTGCTTGAATAGAATTCTCATCGGCGCGCCTTTTTGCTCACCT
GTGATTGCTCCTAC
1056H.C2:
(SEQ ID NO: 49)
AAACTTCCGGAGCCGGTACCGCCACGACGTTAAATTGAAAATAGGT
CTATATATACGAAC
1056H.C3:
(SEQ ID NO: 50)
ACCTATTTTCAATTTAACGTCGTGGCGGTACCGGCTCCGGAAGTTT
TAGAGCTAGAAATA
1056H.C4:
(SEQ ID NO: 51)
CACTGAACATTGTCAGATCCGAGATCGGCCGGCCTAGGATGCATAC
GCATTAAGCGAACA

[0341] 1056I (HL-U6:3-sxl2-gRNA-UTR-opie-mVenus-SV40-U6:3-sxl1-gRNA-UTR-HR-U6-Btub2-UTR) was constructed via cutting 1056C.2 with AscI+AvrII (CutSmart 37° C., no dropout); PCRing U63 promoter from vector 1056X with primers 1056H.C1/1056H.C5 (477 bp, 60-65° C.); PCRing scaffold-UTR- from vector 1056X with primers 1056H.C6/1056H.C4 (2340 bp, 50˜55° C.); and Onestep.

[0342] 1056J (HL-U6:3-sxl2-gRNA-UTR-opie-mVenus-SV40-U6:3-sxl1-gRNA-UTR-HR-U6-Btub3-UTR) was constructed via cutting 1056C.2 with AscI+AvrII (CutSmart 37° C., no dropout); PCRing U63 promoter from vector 1056X with primers 1056H.C1/1056H.C7 (477 bp, 60-65° C.); PCRing scaffold-UTR- from vector 1056X with primers 1056H.C8/1056H.C4 (2340 bp, 50˜55° C.); and Onestep.

[0343] 1056K (HL-U6:3-sxl2-gRNA-UTR-opie-mVenus-SV40-U6:3-sxl1-gRNA-UTR-HR-U6-Btub4-UTR) was constructed via cutting 1056C.2 with AscI+AvrII (CutSmart 37° C., no dropout); PCRing U63 promoter from vector 1056X with primers 1056H.C1/1056H.C9 (477 bp, 60-65° C.); PCRing scaffold-UTR- from vector 1056X with primers 1056H.C10/1056H.C4 (2340 bp, 50˜55° C.); and Onestep.

1056H.C5:
(SEQ ID NO: 52)
AAACCCAGCTGGTGCACACTCAAGCGACGTTAAATTGAAAATAGGT
CTATATATACGAAC
1056H.C6:
(SEQ ID NO: 53)
ACCTATTTTCAATTTAACGTCGCTTGAGTGTGCACCAGCTGGGTTT
TAGAGCTAGAAATA
1056H.C7:
(SEQ ID NO: 54)
AAACCCGATCTGGTTACCGCATTGCGACGTTAAATTGAAAATAGGT
CTATATATACGAAC
1056H.C8:
(SEQ ID NO: 55)
ACCTATTTTCAATTTAACGTCGCAATGCGGTAACCAGATCGGGTTT
TAGAGCTAGAAATA
1056H.C9:
(SEQ ID NO: 56)
AAACACATCTTTAGACCCCGAGGCCGACGTTAAATTGAAAATAGGT
CTATATATACGAAC
1056H.C10:
(SEQ ID NO: 57)
ACCTATTTTCAATTTAACGTCGGCCTCGGGGTCTAAAGATGTGTTT
TAGAGCTAGAAATA

Development of Sterile Males from Cas9 and Dual Female Viability and Male Fertility Deficient gRNA Crosses

[0344] Targets listed as disclosed herein as well as the constructed vectors were tested.

[0345] Firstly, the Cas9 and the gRNA were labelled with different fluorescent markers, such as Red Fluorescent Protein (RFP) or Green Fluorescent Protein (GFP). The insects successfully expressing Cas9 or gRNA also showed the corresponding fluorescent signal (R, red; or G, green). The insect gender and the male fertility were then determined. Results are provided in FIGS. 2A-4. As shown in FIG. 2A, use of vas-Cas9 and gRNAs targeting Slx and bTub provides optimal results, such as (1) female Drosophila suzukii having both Cas9 and gRNAs are alive; (2) male Drosophila suzukii having both Cas9 and gRNAs are sterile; and (3) male and female Drosophila suzukii having either Cas9 or gRNAs are alive and fertile. Without wishing to be bound by the theory, appropriate expression level contributes to such optimal result, for example, too strong expression of Cas9 kills female as well as male Drosophila suzukii having both Cas9 and gRNA, while too weak expression of Cas9 leads to generation of fertile male having both Cas9 and gRNA. Such appropriate expression level may be adjusted by using various the regulatory sequences, such as promoters.

### Non-Limiting Embodiments of the Disclosure

[0346] Embodiment 1. An isolated polynucleotide Cas9 construct as described herein, its complement or an equivalent of each thereof.

[0347] Embodiment 2. The isolated Cas9 construct of Embodiment 1, wherein the construct is of the group of: 874Z, 874S, 874R, 874W, and 874Z1.

[0348] Embodiment 3. A fragment of the isolated Cas9 construct of Embodiment 2, wherein the fragment encodes a Cas9 polypeptide.

[0349] Embodiment 4. A vector comprising the isolated polynucleotide of Embodiment 3.

[0350] Embodiment 5. An isolated host cell comprising the isolated polynucleotide of any of Embodiments 1-3 or the vector of Embodiment 4, optionally wherein the host cell is an insect cell.

[0351] Embodiment 6. An expression product of the polynucleotide of any of Embodiments 1-3 or the vector of Embodiment 4.

[0352] Embodiment 7. A guide RNA (gRNA) as disclosed herein, or its complement or an equivalent of each thereof.

[0353] Embodiment 8. The gRNA of Embodiment 7, wherein the gRNA is a single guide RNA (sgRNA) or a double guide RNA (dg RNA).

[0354] Embodiment 9. A vector comprising the gRNA of Embodiment 7 or 8.

[0355] Embodiment 10. An isolated host cell comprising the gRNA of Embodiment 7 or 8, or the vector of Embodiment 9, optionally wherein the host cell is an insect cell.

[0356] Embodiment 11. An isolated host cell comprising the isolated polynucleotide of any of Embodiments 1-3 and the gRNA of Embodiment 7 or 8, optionally wherein the host cell is an insect cell.

[0357] Embodiment 12. The isolated host cell of any of Embodiments 5, 10, or 11, wherein the host cell is an egg, a sperm or a zygote.

[0358] Embodiment 13. A host cell system comprising a first host cell of Embodiment 5 and a second host cell of Embodiment 10, wherein the first host cell and the second host cell are homozygous, optionally wherein the host cell is an insect cell.

[0359] Embodiment 14. An insect comprising the isolated host cell of any of Embodiments 10-12.

[0360] Embodiment 15. A mating system comprising a first host cell of Embodiment 5 and a second host cell of Embodiment 10, wherein the first host cell and the second host cell are homozygous.

[0361] Embodiment 16. A progeny produced by the mating system of Embodiment 15.

[0362] Embodiment 17. A CRISPR system comprising:
[0363] (a) a Cas9 polypeptide as described herein, or an equivalent thereof, and
[0364] (b) a recombinant or synthetic guide RNA (gRNA) as described herein, or an equivalent thereof.

[0365] Embodiment 18. An isolated host cell comprising the CRISPR system of Embodiment 17.

[0366] Embodiment 19. A method to sterilize or induce lethality of an insect comprising inserting the cell of Embodiment 18 into the insect.

[0367] Embodiment 20. A method of producing a genetically modified progeny of a sterile male Aedes aegypti mosquito egg, the method comprising:
[0368] (a) introducing at least one nucleic acid sequence into a first Aedes aegypti mosquito, wherein the at least one nucleic acid sequence comprising
   [0369] at least a first guide RNA targeting a female essential genomic sequence that is required for female-specific viability; and
   [0370] at least a second guide RNA targeting a male sterility genomic sequence that is required for male-specific fertility;
[0371] (b) introducing an endonuclease into a second Aedes aegypti mosquito, the second Aedes aegypti mosquito; and
[0372] (c) genetically crossing the first Aedes aegypti mosquito and the second Aedes aegypti mosquito, wherein genetically crossing the first Aedes aegypti mosquito and the second Aedes aegypti mosquito produces a progeny of sterile male Aedes aegypti mosquito eggs.

[0373] Embodiment 21. The method of Embodiment 20, wherein the female essential genomic sequence comprises a gene essential for female-specific viability or a female-specific exon essential for female-specific development and/or female-specific viability.

[0374] Embodiment 22. The method of Embodiment 21, wherein the female-essential genomic sequence is transformer 2 (tra-2).

[0375] Embodiment 23. The method of Embodiment 21, wherein the female essential genomic sequence is doublesex (dsx).

[0376] Embodiment 24. The method of any one of Embodiments 20-23, wherein the at least one first guide RNA comprises more than one first guide RNA each of which targets a different female-essential genomic sequence that is required for female-specific viability or targets a different region of the same female-essential genomic sequence that is required for female-specific viability.

[0377] Embodiment 25. The method of any one of Embodiments 20-24, wherein the male sterility genomic sequence comprises a gene essential for male-specific sterility.

[0378] Embodiment 26. The method of Embodiment 25, wherein the male sterility genomic sequence is selected from the group consisting of βTubulin (βTub), fuzzy onions (Fzo), protaimine A (ProtA), or spermatocyte arrest (Sa).

[0379] Embodiment 27. The method of Embodiment 25 or 26, wherein the at least one second guide RNA comprises more than one second guide RNA each of which targets a different male sterility genomic sequence that is required for male fertility or targets a different region of the same male sterility genomic sequence that is required for male specific fertility.

[0380] Embodiment 28. The method of any one of Embodiments 20-27, wherein the endonuclease comprises a CRISPR-associated sequence 9 (Cas9) endonuclease or a variant thereof, a CRISPR-associated sequence 13 (Cas13) endonuclease or a variant thereof, a CRISPR from Prevotella and Francisella 1 (Cpf1) endonuclease or a variant thereof, a CRISPR from Microgenomates and Smithella 1 (Cms1) endonuclease or a variant thereof, or a CRISPR-associated sequence 6 (Cash) endonuclease or a variant thereof.

[0381] Embodiment 29. The method of Embodiment 20, wherein the first Aedes aegypti is a female and the second Aedes aegypti is a male.

[0382] Embodiment 30. The method of Embodiment 20, wherein the first Aedes aegypti is a male and the second Aedes aegypti is a female.

[0383] Embodiment 31. The method of Embodiment 20, wherein the introducing step (a) comprises integrating the at least one nucleic acid into the genome of the first Aedes aegypti mosquito.

[0384] Embodiment 32. The method of Embodiment 20, wherein the genetically crossing step (c) comprises producing progeny comprising the endonuclease, at least one first guide RNA, and at least one second guide RNA from which male Aedes aegypti mosquito eggs mature to adulthood.

[0385] Embodiment 33. The method of any one of Embodiments 20-32, wherein the endonuclease is operably linked to a nup50 promoter or a fragment thereof or a uniq promoter or a fragment thereof.

[0386] Embodiment 34. A progeny of Aedes aegypti mosquito eggs comprising up to 100% sterile male Aedes aegypti mosquito eggs produced by the method of any one of Embodiments 20-33.

### EQUIVALENTS

[0387] Unless otherwise defined, all technical and scientific terms used herein have the same meaning as commonly understood by one of ordinary skill in the art to which this technology belongs.

[0388] The present technology illustratively described herein may suitably be practiced in the absence of any element or elements, limitation or limitations, not specifically disclosed herein. Thus, for example, the terms “comprising,” “including,” “containing,” etc. shall be read expansively and without limitation. Additionally, the terms and expressions employed herein have been used as terms of description and not of limitation, and there is no intention in the use of such terms and expressions of excluding any equivalents of the features shown and described or portions thereof, but it is recognized that various modifications are possible within the scope of the present technology claimed.

[0389] Thus, it should be understood that the materials, methods, and examples provided here are representative of preferred aspects, are exemplary, and are not intended as limitations on the scope of the present technology.

[0390] It should be understood that although the present invention has been specifically disclosed by certain aspects, embodiments, and optional features, modification, improvement and variation of such aspects, embodiments, and optional features can be resorted to by those skilled in the art, and that such modifications, improvements and variations are considered to be within the scope of this disclosure.

[0391] The present technology has been described broadly and generically herein. Each of the narrower species and sub-generic groupings falling within the generic disclosure also form part of the present technology. This includes the generic description of the present technology with a proviso or negative limitation removing any subject matter from the genus, regardless of whether or not the excised material is specifically recited herein.

[0392] In addition, where features or aspects of the present technology are described in terms of Markush groups, those skilled in the art will recognize that the present technology is also thereby described in terms of any individual member or subgroup of members of the Markush group.

[0393] It is to be understood that while the invention has been described in conjunction with the detailed description thereof, the foregoing description is intended to illustrate and not limit the scope of the invention, which is defined by the scope of the appended claims. Other aspects, advantages, and modifications are within the scope of the following claims.

[0394] All publications, patent applications, patents, and other references mentioned herein are expressly incorporated by reference in their entirety, to the same extent as if each were incorporated by reference individually. In case of conflict, the present specification, including definitions, will control.

[0395] Other aspects are set forth within the following claims.

### REFERENCES

[0396] 1. Alphey, Luke. 2016. “Genetic Control of Mosquitoes.” New Biotechnology 33 (July): S30.
[0397] 2. Aryan A, Anderson M A E, Biedler J K, et al. Nix alone is sufficient to convert female Aedes aegypti into fertile males and myo-sex is needed for male flight [published online ahead of print, 2020 Jul. 13]. Proc Natl Acad Sci USA. (2020); 202001132. doi:10.1073/pnas.2001132117
[0398] 3. Awata, Hiroko, Takahito Watanabe, Yoshitaka Hamanaka, Taro Mito, Sumihare Noji, and Makoto Mizunami. 2015. “Knockout Crickets for the Study of Learning and Memory: Dopamine Receptor Dop1 Mediates Aversive but Not Appetitive Reinforcement in Crickets.” Scientific Reports 5 (November): 15885.
[0399] 4. Bassett, Andrew R., and Ji-Long Liu. 2014. “CRISPR/Cas9 and Genome Editing in Drosophila.” Journal of Genetics and Genomics=Yi Chuan Xue Bao 41 (1): 7-19.
[0400] 5. Bassett, Andrew R., Charlotte Tibbit, Chris P. Ponting, and Ji-Long Liu. 2013. “Highly Efficient Targeted Mutagenesis of Drosophila with the CRISPR/Cas9 System.” Cell Reports 4 (1): 220-28.
[0401] 6. Bellini, R., A. Medici, A. Puggioli, F. Balestrino, and M. Carrieri. 2013. “Pilot Field Trials with Aedes Albopictus Irradiated Sterile Males in Italian Urban Areas.” Journal of Medical Entomology 50 (2): 317-25.
[0402] 7. Bopp, D., G. Saccone, and M. Beye. 2014. “Sex Determination in Insects: Variations on a Common Theme.” Sexual Development: Genetics, Molecular Biology, Evolution, Endocrinology, Embryology, and Pathology of Sex Determination and Differentiation 8 (1-3): 20-28.
[0403] 8. Bouyer, J., Vreysen, M. J. B. Concerns about the feasibility of using “precision guided sterile males” to control insects. Nat Commun 10, 3954 (2019). https://doi.org/10.1038/s41467-019-11616-9
[0404] 9. Bushland, R. C., A. W. Lindquist, and E. F. Knipling. 1955. “Eradication of Screw-Worms through Release of Sterilized Males.” Science 122 (3163): 287-88.
[0405] 10. Carvalho, Danilo O., Andrew R. McKemey, Luiza Garziera, Renaud Lacroix, Christl A. Donnelly, Luke Alphey, Aldo Malavasi, and Margareth L. Capurro. 2015. “Suppression of a Field Population of Aedes Aegypti in Brazil by Sustained Release of Transgenic Male Mosquitoes.” PLoS Neglected Tropical Diseases 9 (7): e0003864.
[0406] 11. Catteruccia, Flaminia, Andrea Crisanti, and Ernst A. Wimmer. 2009. “Transgenic Technologies to Induce Sterility.” Malaria Journal 8 Suppl 2 (November): S7.
[0407] 12. Catteruccia, Flaminia, Jason P. Benton, and Andrea Crisanti. 2005. “An Anopheles Transgenic Sexing Strain for Vector Control.” Nature Biotechnology 23 (11): 1414-17.
[0408] 13. Champer, Jackson, Riona Reeves, Suh Yeon Oh, Chen Liu, Jingxian Liu, Andrew G. Clark, and Philipp W. Messer. 2017. “Novel CRISPR/Cas9 Gene Drive Constructs Reveal Insights into Mechanisms of Resistance Allele Formation and Drive Efficiency in Genetically Diverse Populations.” PLoS Genetics 13 (7): e1006796.
[0409] 14. Chatzispyrou, Iliana A., Ntsiki M. Held, Laurent Mouchiroud, Johan Auwerx, and Riekelt H. Houtkooper. 2015. “Tetracycline Antibiotics Impair Mitochondrial Function and Its Experimental Use Confounds Research.” Cancer Research 75 (21): 4446-49.
[0410] 15. Chu, Van Trung, Timm Weber, Benedikt Wefers, Wolfgang Wurst, Sandrine Sander, Klaus Rajewsky, and Ralf Kuhn. 2015. “Increasing the Efficiency of Homology-Directed Repair for CRISPR-Cas9-Induced Precise Gene Editing in Mammalian Cells.” Nature Biotechnology 33 (March): 543.
[0411] 16. Diniz, Diego Felipe Araujo, Cleide Maria Ribeiro de Albuquerque, Luciana Oliveira Oliva, Maria Alice Varjal de Melo-Santos, and Constância Flávia Junqueira Ayres. 2017. “Diapause and Quiescence: Dormancy Mechanisms That Contribute to the Geographical Expansion of Mosquitoes and Their Evolutionary Success.” Parasites & Vectors 10 (1): 310.
[0412] 17. Dodson, Brittany L., Grant L. Hughes, Oluwatobi Paul, Amy C. Matacchiero, Laura D. Kramer, and Jason L. Rasgon. 2014. “Wolbachia Enhances West Nile Virus (WNV) Infection in the Mosquito Culex tarsalis.” PLoS Neglected Tropical Diseases 8 (7): e2965.
[0413] 18. Dyck, V. A., J. Hendrichs, and A. S. Robinson, eds. 2005. Sterile Insect Technique: Principles and Practice in Area-Wide Integrated Pest Management.
[0414] 19. Esu, Ekpereonne, Audrey Lenhart, Lucy Smith, and Olaf Horstick. 2010. “Effectiveness of Peridomestic Space Spraying with Insecticide on Dengue Transmission; Systematic Review.” Tropical Medicine & International Health: TM & IH 15 (5): 619-31.
[0415] 20. Fu, Guoliang, Rosemary S. Lees, Derric Nimmo, Diane Aw, Li Jin, Pam Gray, Thomas U. Berendonk, et al. 2010. “Female-Specific Flightless Phenotype for Mosquito Control.” Proceedings of the National Academy of Sciences of the United States of America 107 (10): 4550-54.
[0416] 21. Gantz, Valentino M., Nijole Jasinskiene, Olga Tatarenkova, Aniko Fazekas, Vanessa M. Macias, Ethan Bier, and Anthony A. James. 2015. “Highly Efficient Cas9-Mediated Gene Drive for Population Modification of the Malaria Vector Mosquito Anopheles Stephensi.” Proceedings of the National Academy of Sciences of the United States of America 112 (49): E6736-43.
[0417] 22. George, Leyanna, Audrey Lenhart, Joao Toledo, Adhara Lazaro, Wai Han, Raman Velayudhan, Silvia Runge Ranzinger, and Olaf Horstick. 2015. “Community-Effectiveness of Temephos for Dengue Vector Control: A Systematic Literature Review.” PLoS Neglected Tropical Diseases 9 (9): e0004006.
[0418] 23. Gilles, Jeremie R. L., Marc F. Schetelig, Francesca Scolari, Frantis̆ek Marec, Margareth L. Capurro, Gerald Franz, and Kostas Bourtzis. 2014. “Towards Mosquito Sterile Insect Technique Programmes: Exploring Genetic, Molecular, Mechanical and Behavioural Methods of Sex Separation in Mosquitoes.” Acta Tropica 132 Suppl (April): S178-87.
[0419] 24. Gratz, Scott J., Alexander M. Cummings, Jennifer N. Nguyen, Danielle C. Hamm, Laura K. Donohue, Melissa M. Harrison, Jill Wildonger, and Kate M. O'Connor-Giles. 2013. “Genome Engineering of Drosophila with the CRISPR RNA-Guided Cas9 Nuclease.” Genetics 194 (4): 1029-35.
[0420] 25. Hall, Andrew Brantley, Sanjay Basu, Xiaofang Jiang, Yumin Qi, Vladimir A. Timoshevskiy, James K. Biedler, Maria V. Sharakhova, et al. 2015. “Sex Determination. A Male-Determining Factor in the Mosquito Aedes Aegypti.” Science 348 (6240): 1268-70.
[0421] 26. Hammond, Andrew, Roberto Galizi, Kyros Kyrou, Alekos Simoni, Carla Siniscalchi, Dimitris Katsanos, Matthew Gribble, et al. 2015. “A CRISPR-Cas9 Gene Drive System Targeting Female Reproduction in the Malaria Mosquito Vector Anopheles gambiae.” Nature Biotechnology 34 (December): 78.
[0422] 27. Harris, Angela F., Andrew R. McKemey, Derric Nimmo, Zoe Curtis, Isaac Black, Sian A. Morgan, Marco Neira Oviedo, et al. 2012. “Successful Suppression of a Field Mosquito Population by Sustained Release of Engineered Male Mosquitoes.” Nature Biotechnology 30 (September): 828.
[0423] 28. Harris, Angela F., Derric Nimmo, Andrew R. McKemey, Nick Kelly, Sarah Scaife, Christl A. Donnelly, Camilla Beech, William D. Petrie, and Luke Alphey. 2011. “Field Performance of Engineered Male Mosquitoes.” Nature Biotechnology 29 (11): 1034-37.
[0424] 29. Haye, T., P. Girod, A. G. S. Cuthbertson, X. G. Wang, K. M. Daane, K. A. Hoelmer, C. Baroffio, J. P. Zhang, and N. Desneux. 2016. “Current SWD IPM Tactics and Their Practical Implementation in Fruit Crops across Different Regions around the World.” Journal of Pest Science 89 (3): 643-51.
[0425] 30. Hemingway, Janet, Linda Field, and John Vontas. 2002. “An Overview of Insecticide Resistance.” Science 298 (5591): 96-97.
[0426] 31. Hendrichs, J., A. S. Robinson, J. P. Cayol, and W. Enkerlin. 2002. “Medfly Areawide Sterile Insect Technique Programmes for Prevention, Suppression or Eradication: The Importance of Mating Behavior Studies.” The Florida Entomologist 85 (1): 1-13.
[0427] 32. Hoang, Kim Phuc, Tze Min Teo, Thien Xuan Ho, and Vinh Sy Le. 2016. “Mechanisms of Sex Determination and Transmission Ratio Distortion in Aedes Aegypti.” Parasites & Vectors 9 (January): 49.
[0428] 33. Hoyle, H. D., J. A. Hutchens, F. R. Turner, and E. C. Raff. 1995. “Regulation of Beta-Tubulin Function and Expression in Drosophila Spermatogenesis.” Developmental Genetics 16 (2): 148-70.
[0429] 34. Huang, Yuping, Yazhou Chen, Baosheng Zeng, Yajun Wang, Anthony A. James, Geoff M. Gun, Guang Yang, Xijian Lin, Yongping Huang, and Minsheng You. 2016. “CRISPR/Cas9 Mediated Knockout of the Abdominal-A Homeotic Gene in the Global Pest, Diamondback Moth (Plutella Xylostella).” Insect Biochemistry and Molecular Biology 75 (August): 98-106.
[0430] 35. Hughes, Grant L., Ana Rivero, and Jason L. Rasgon. 2014. “Wolbachia Can Enhance Plasmodium Infection in Mosquitoes: Implications for Malaria Control?” PLoS Pathogens 10 (9): e1004182.
[0431] 36. Hwa, Jennifer J., Mark A. Hiller, Margaret T. Fuller, and Ansgar Santel. 2002. “Differential Expression of the Drosophila Mitofusin Genes Fuzzy Onions (fzo) and Dmfn.” Mechanisms of Development 116 (1-2): 213-16.
[0432] 37. Ioriatti, C., V. Walton, D. Dalton, G. Anfora, A. Grassi, S. Maistri, and V. Mazzoni. 2015. “Drosophila Suzukii (Diptera: Drosophilidae) and Its Potential Impact to Wine Grapes During Harvest in Two Cool Climate Wine Grape Production Regions.” Journal of Economic Entomology 108 (3): 1148-55.
[0433] 38. Joshi, Deepak, Michael J. McFadden, David Bevins, Fengrui Zhang, and Zhiyong Xi. 2014. “Wolbachia Strain wAlbB Confers Both Fitness Costs and Benefit on Anopheles Stephensi.” Parasites & Vectors 7 (July): 336.
[0434] 39. Kalghatgi, Sameer, Catherine S. Spina, James C. Costello, Marc Liesa, J. Ruben Morones-Ramirez, Shimyn Slomovic, Anthony Molina, Orian S. Shirihai, and James J. Collins. 2013. “Bactericidal Antibiotics Induce Mitochondrial Dysfunction and Oxidative Damage in Mammalian Cells.” Science Translational Medicine 5 (192): 192ra85.
[0435] 40. Kandul, N. P., Liu, J., Sanchez C., H. M. et al. Transforming insect population control with precision guided sterile males with demonstration in flies. Nat Commun 10, 84 (2019). https://doi.org/10.1038/s41467-018-07964-7
[0436] 41. Kandul, Nikolay P., Junru Liu, Hector M. Sanchez, Sean L. Wu, John M. Marshall, and Omar S. Akbari. 2018. “Transforming Insect Population Control with Precision Guided Sterile Males.” bioRxiv. https://doi.org/10.1101/377721.
[0437] 42. KaramiNejadRanjbar, Mohammad, Kolja N. Eckermann, Hassan M. M. Ahmed, Hector M. Sanchez C, Stefan Dippel, John M. Marshall, and Ernst A. Wimmer. 2018. “Consequences of Resistance Evolution in a Cas9-Based Sex Conversion-Suppression Gene Drive for Insect Pest Management.” Proceedings of the National Academy of Sciences of the United States of America 115 (24): 6189-94.
[0438] 43. Kistler, Kathryn E., Leslie B. Vosshall, and Benjamin J. Matthews. 2015. “Genome Engineering with CRISPR-Cas9 in the Mosquito Aedes Aegypti.” Cell Reports 11 (1): 51-60.
[0439] 44. Klassen, W., and C. F. Curtis. 2005. “History of the Sterile Insect Technique.” In Sterile Insect Technique: Principles and Practice in Area-Wide Integrated Pest Management, edited by V. A. Dyck, J. Hendrichs, and A. S. Robinson, 3-36. Dordrecht: Springer Netherlands.
[0440] 45. Knipling, E. F. 1955. “Possibilities of Insect Control or Eradication Through the Use of Sexually Sterile Males.” Journal of Economic Entomology 48 (4): 459-62.
[0441] 46. Krafsur, E. S., H. Townson, G. Davidson, and C. F. Curtis. 1986. “Screwworm Eradication Is What It Seems.” Nature 323 (6088): 495-96.
[0442] 47. Kyrou, Kyros, Andrew M. Hammond, Roberto Galizi, Nace Kranjc, Austin Burt, Andrea K. Beaghton, Tony Nolan, and Andrea Crisanti. 2018. “A CRISPR-Cas9 Gene Drive Targeting Doublesex Causes Complete Population Suppression in Caged Anopheles Gambiae Mosquitoes.” Nature Biotechnology, September. https://doi.org/10.1038/nbt.4245.
[0443] 48. Li, Fang, and Maxwell J. Scott. 2016. “CRISPR/Cas9-Mediated Mutagenesis of the White and Sex Lethal Loci in the Invasive Pest, Drosophila Suzukii.” Biochemical and Biophysical Research Communications 469 (4): 911-16.
[0444] 49. Li, Ming, Michelle Bui, Ting Yang, Bradley White, and Omar Akbari. 2017. “Germline Cas9 Expression Yields Highly Efficient Genome Engineering in a Major Worldwide Disease Vector, Aedes Aegypti.” https://doi.org/10.1101/156778.
[0445] 50. Li, Xueyan, Dingding Fan, Wei Zhang, Guichun Liu, Lu Zhang, Li Zhao, Xiaodong Fang, et al. 2015. “Outbred Genome Sequencing and CRISPR/Cas9 Gene Editing in Butterflies.” Nature Communications 6 (September): 8212.
[0446] 51. Li, Yan, Jie Zhang, Dafeng Chen, Pengcheng Yang, Feng Jiang, Xianhui Wang, and Le Kang. 2016. “CRISPR/Cas9 in Locusts: Successful Establishment of an Olfactory Deficiency Line by Targeting the Mutagenesis of an Odorant Receptor Co-Receptor (Orco).” Insect Biochemistry and Molecular Biology 79 (December): 27-35.
[0447] 52. Liang, Xiquan, Jason Potter, Shantanu Kumar, Namritha Ravinder, and Jonathan D. Chesnut. 2017. “Enhanced CRISPR/Cas9-Mediated Precise Genome Editing by Improved Design and Delivery of gRNA, Cas9 Nuclease, and Donor DNA.” Journal of Biotechnology 241 (Supplement C): 136-46.
[0448] 53. Liu, Nannan. 2015. “Insecticide Resistance in Mosquitoes: Impact, Mechanisms, and Research Directions.” Annual Review of Entomology 60 (1): 537-59.
[0449] 54. Ma, Sanyuan, Jiasong Chang, Xiaogang Wang, Yuanyuan Liu, Jianduo Zhang, Wei Lu, Jie Gao, Run Shi, Ping Zhao, and Qingyou Xia. 2014. “CRISPR/Cas9 Mediated Multiplex Genome Editing and Heritable Mutagenesis of BmKu70 in Bombyx mori.” Scientific Reports 4 (March): 4489.
[0450] 55. Maciel-de-Freitas, Rafael, Fernando Campos Avendanho, Rosangela Santos, Gabriel Sylvestre, Simone Costa Araújo, José Bento Pereira Lima, Ademir Jesus Martins, Giovanini Evelim Coelho, and Denise Valle. 2014. “Undesirable Consequences of Insecticide Resistance Following Aedes Aegypti Control Activities Due to a Dengue Outbreak.” PloS One 9 (3): e92424.
[0451] 56. Maruyama, Takeshi, Stephanie K. Dougan, Matthias C. Truttmann, Angelina M. Bilate, Jessica R. Ingram, and Hidde L. Ploegh. 2015. “Increasing the Efficiency of Precise Genome Editing with CRISPR-Cas9 by Inhibition of Nonhomologous End Joining.” Nature Biotechnology 33 (March): 538.
[0452] 57. Massonnet-Bruneel, B. et al. Fitness of transgenic mosquito Aedes aegypti males carrying a dominant lethal genetic system. PLoS One 8, e62711 (2013).
[0453] 58. Mazzi, Dominique, Esther Bravin, Manuela Meraner, Robert Finger, and Stefan Kuske. 2017. “Economic Impact of the Introduction and Establishment of Drosophila Suzukii on Sweet Cherry Production in Switzerland.” Insects 8 (1). https://doi.org/10.3390/insects8010018.
[0454] 59. Moullan, Norman, Laurent Mouchiroud, Xu Wang, Dongryeol Ryu, Evan G. Williams, Adrienne Mottis, Virginija Jovaisaite, et al. 2015. “Tetracyclines Disturb Mitochondrial Function across Eukaryotic Models: A Call for Caution in Biomedical Research.” Cell Reports, March. https://doi.org/10.1016/j.celrep.2015.02.034.
[0455] 60. Nene, Vishvanath, Jennifer R. Wortman, Daniel Lawson, Brian Haas, Chinnappa Kodira, Zhijian Jake Tu, Brendan Loftus, et al. 2007. “Genome Sequence of Aedes aegypti, a Major Arbovirus Vector.” Science 316 (5832): 1718-23.
[0456] 61. Oberhofer, Georg, Tobin Ivy, and Bruce A. Hay. 2018. “Behavior of Homing Endonuclease Gene Drives Targeting Genes Required for Viability or Female Fertility with Multiplexed Guide RNAs.” Proceedings of the National Academy of Sciences of the United States of America 115 (40): E9343-52.
[0457] 62. Papathanos, Philippos A., Hervé C. Bossin, Mark Q. Benedict, Flaminia Catteruccia, Colin A. Malcolm, Luke Alphey, and Andrea Crisanti. 2009. “Sex Separation Strategies: Past Experience and New Approaches.” Malaria Journal 8 Suppl 2 (November): S5.
[0458] 63. Pluess, Bianca, Frank C. Tanser, Christian Lengeler, and Brian L. Sharp. 2010. “Indoor Residual Spraying for Preventing Malaria.” Cochrane Database of Systematic Reviews, no. 4 (April): CD006657.
[0459] 64. Port, Fillip, Hui-Min Chen, Tzumin Lee, and Simon L. Bullock. 2014. “Optimized CRISPR/Cas Tools for Efficient Germline and Somatic Genome Engineering in Drosophila.” Proceedings of the National Academy of Sciences of the United States of America 111 (29): E2967-76.
[0460] 65. Price, Dana C., Andrea Egizi, and Dina M. Fonseca. 2015a. “Characterization of the Doublesex Gene within the Culex pipiens Complex Suggests Regulatory Plasticity at the Base of the Mosquito Sex Determination Cascade.” BMC Evolutionary Biology 15 (June): 108.
[0461] 66. Price, Dana C., Andrea Egizi, and Dina M. Fonseca. 2015b. “The Ubiquity and Ancestry of Insect Doublesex.” Scientific Reports 5 (August): 13068.
[0462] 67. Reid, William, and David A. O'Brochta. 2016. “Applications of Genome Editing in Insects.” Current Opinion in Insect Science 13 (February): 43-54.
[0463] 68. Salvemini, Marco, Rocco D'Amato, Valeria Petrella, Serena Aceto, Derric Nimmo, Marco Neira, Luke Alphey, Lino C. Polito, and Giuseppe Saccone. 2013. “The Orthologue of the Fruitfly Sex Behaviour Gene Fruitless in the Mosquito Aedes Aegypti: Evolution of Genomic Organisation and Alternative Splicing.” PloS One 8 (2): e48554.
[0464] 69. Salvemini, Marco, Umberto Mauro, Fabrizio Lombardo, Andreina Milano, Vincenzo Zazzaro, Bruno Arca, Lino C. Polito, and Giuseppe Saccone. 2011. “Genomic Organization and Splicing Evolution of the Doublesex Gene, a Drosophila Regulator of Sexual Differentiation, in the Dengue and Yellow Fever Mosquito Aedes aegypti.” BMC Evolutionary Biology 11 (February): 41.
[0465] 70. Sanchez, Lucas. 2008. “Sex-Determining Mechanisms in Insects.” The International Journal of Developmental Biology 52 (7): 837-56.
[0466] 71. Sanchez C., H. M., Wu, S. L., Bennett, J. B. & Marshall, J. M. MGDrivE: A modular simulation framework for the spread of gene drives through spatially-explicit mosquito populations. (2018). doi:10.1101/350488
[0467] 72. Sarno, Francesca, Maria F. Ruiz, José M. Eirin-López, André L. P. Perondini, Denise Selivon, and Lucas Sanchez. 2010. “The Gene Transformer-2 of Anastrepha Fruit Flies (Diptera, Tephritidae) and Its Evolution in Insects.” BMC Evolutionary Biology 10 (May): 140.
[0468] 73. Sartain, Caroline V., Jun Cui, Richard P. Meisel, and Mariana F. Wolfner. 2011. “The poly(A) Polymerase GLD2 Is Required for Spermatogenesis in Drosophila melanogaster.” Development 138 (8): 1619-29.
[0469] 74. Scali, Christina, Flaminia Catteruccia, Qiuxiang Li, and Andrea Crisanti. 2005. “Identification of Sex-Specific Transcripts of the Anopheles Gambiae Doublesex Gene.” The Journal of Experimental Biology 208 (Pt 19): 3701-9.
[0470] 75. Schetelig, M. F., K-Z Lee, S. Otto, L. Talmann, J. Stökl, T. Degenkolb, A. Vilcinskas, and R. Halitschke. 2018. “Environmentally Sustainable Pest Control Options for Drosophila Suzukii.” Journal of Applied Entomology=Zeitschrift Fur Angewandte Entomologie 142 (1-2): 3-17.
[0471] 76. Schmidt, Tom L., Nicholas H. Barton, Gordana Ras̆ić, Andrew P. Turley, Brian L. Montgomery, Inaki Iturbe-Ormaetxe, Peter E. Cook, et al. 2017. “Local Introduction and Heterogeneous Spatial Spread of Dengue-Suppressing Wolbachia through an Urban Population of Aedes Aegypti.” PLoS Biology 15 (5): e2001894.
[0472] 77. Sekiné, Kazuki, Tadashi Furusawa, and Masatsugu Hatakeyama. 2015. “The Boule Gene Is Essential for Spermatogenesis of Haploid Insect Male.” Developmental Biology 399 (1): 154-63.
[0473] 78. Slade, Glen, and Neil Morrison. 2014. “Developing GM Insects for Sustainable Pest Control in Agriculture and Human Health.” BMC Proceedings 8 (4): 043.
[0474] 79. Stockton, Dara G., Anna K. Wallingford, and Gregory M. Loeb. 2018. “Phenotypic Plasticity Promotes Overwintering Survival in A Globally Invasive Crop Pest, Drosophila Suzukii.” Insects 9 (3). https://doi.org/10.3390/insects9030105.
[0475] 80. Thailayil, Janis, Kalle Magnusson, H. Charles J. Godfray, Andrea Crisanti, and Flaminia Catteruccia. 2011. “Spermless Males Elicit Large-Scale Female Responses to Mating in the Malaria Mosquito Anopheles gambiae.” Proceedings of the National Academy of Sciences of the United States of America 108 (33): 13677-81.
[0476] 81. Thomas, D. D., C. A. Donnelly, R. J. Wood, and L. S. Alphey. 2000. “Insect Population Control Using a Dominant, Repressible, Lethal Genetic System.” Science 287 (5462): 2474-76.
[0477] 82. Van Steenwyk, R. A., and M. P. Bolda. 2014. “Spotted Wing Drosophila: Devastating Effects on Cherry and Berry Pest Management.” In XXIX International Horticultural Congress on Horticulture: Sustaining Lives, Livelihoods and Landscapes (IHC2014): 1105, 11-18.
[0478] 83. Van Timmeren, Steven, David Mota-Sanchez, John C. Wise, and Rufus Isaacs. 2017. “Baseline Susceptibility of Spotted Wing Drosophila (Drosophila Suzukii) to Four Key Insecticide Classes.” Pest Management Science, August. https://doi.org/10.1002/ps.4702.
[0479] 84. Vanderplank, F. L. 1944. “Hybridization between Glossina Species and Suggested New Method for Control of Certain Species of Tsetse.” Nature 154 (November): 607.
[0480] 85. Walsh, Douglas B., Mark P. Bolda, Rachael E. Goodhue, Amy J. Dreves, Jana Lee, Denny J. Bruck, Vaughn M. Walton, Sally D. O'Neal, and Frank G. Zalom. 2011. “Drosophila Suzukii (Diptera: Drosophilidae): Invasive Pest of Ripening Soft Fruit Expanding Its Geographic Range and Damage Potential.” Journal of Integrated Pest Management 2 (1): G1-7.
[0481] 86. Walton, V. M., H. J. Burrack, D. T. Dalton, R. Isaacs, N. Wiman, and C. Ioriatti. 2014. “Past, Present and Future of Drosophila Suzukii: Distribution, Impact and Management in United States Berry Fruits.” In XXIX International Horticultural Congress on Horticulture: Sustaining Lives, Livelihoods and Landscapes (IHC2014): II 1117, 87-94.
[0482] 87. Whyard, Steve, Cassidy N. G. Erdelyan, Alison L. Partridge, Aditi D. Singh, Nigel W. Beebe, and Rupert Capina. 2015. “Silencing the Buzz: A New Approach to Population Suppression of Mosquitoes by Feeding Larvae Double-Stranded RNAs.” Parasites & Vectors 8 (February): 96.
[0483] 88. Wilkinson, T. L. 1998. “The Elimination of Intracellular Microorganisms from Insects: An Analysis of Antibiotic-Treatment in the Pea Aphid (Acyrthosiphon Pisum).” Comparative Biochemistry and Physiology. Part A, Molecular & Integrative Physiology 119 (4): 871-81.
[0484] 89. Windbichler, Nikolai, Philippos Aris Papathanos, and Andrea Crisanti. 2008. “Targeting the X Chromosome during Spermatogenesis Induces Y Chromosome Transmission Ratio Distortion and Early Dominant Embryo Lethality in Anopheles Gambiae.” PLoS Genetics 4 (12): e1000291.
[0485] 90. World Health Organization. 2014. “A Global Brief on Vector-Borne Diseases.” http://apps.who.int/iris/bitstream/10665/111008/1/WHO_DCO_WHD_2014.1_eng.pdf.
[0486] 91. Yaffe, M. P. 1997. “Mitochondrial Morphogenesis: Fusion Factor for Fly Fertility.” Current Biology: CB 7 (12): R782-83.
[0487] 92. Yakob, Laith, Sebastian Funk, Anton Camacho, Oliver Brady, and W. John Edmunds. 2017. “Aedes Aegypti Control Through Modernized, Integrated Vector Management.” PLoS Currents 9 (January). https://doi.org/10.1371/currents.outbreaks.45 deb 8e03a438c4d088afb4fafae8747.
[0488] 93. Zeh, Jeanne A., Melvin M. Bonilla, Angelica J. Adrian, Sophia Mesfin, and David W. Zeh. 2012. “From Father to Son: Transgenerational Effect of Tetracycline on Sperm Viability.” Scientific Reports 2 (April): 375.
[0489] 94. Zetsche, Bernd, Jonathan S. Gootenberg, Omar O. Abudayyeh, Ian M. Slaymaker, Kira S. Makarova, Patrick Essletzbichler, Sara E. Volz, et al. 2015. “Cpf1 Is a Single RNA-Guided Endonuclease of a Class 2 CRISPR-Cas System.” Cell 163 (3): 759-71.

1. A mating system producing a genetically modified progeny that is a sterile male insect of Drosophila suzukii or Aedes aegypti mosquito, comprising a first parental insect and a second parental insect,
wherein the first parental insect comprises at least one nucleic acid sequence that comprises:
(a) at least a first guide RNA targeting a female essential genomic sequence that is required for female-specific viability in Drosophila suzukii or Aedes aegypti, and
(b) at least a second guide RNA targeting a male sterility genomic sequence that is required for male-specific fertility in Drosophila suzukii or Aedes aegypti,
wherein the targeted sequence required for female-specific viability in Aedes aegypti is selected from a sequence of the Intersex or labrum (Lab) gene or wherein the targeted sequence required for male-specific fertility in Aedes aegypti is a sequence of the zero population growth (Zpg)1 gene, optionally wherein the targeted sequence is a sequence in the gene exon, and
wherein the targeted sequence required for male-specific fertility in Drosophila suzukii is selected from a sequence of Cannonball (Can), meiosis I arrest (Mia), P-element induced wimpy testis (PIWI), Heterochromatin Protein 1e (HP1e), zero population growth (Zpg), male sterile (3) K81 (K81), misfire (Mfr), or sneaky (Snky), optionally wherein the targeted sequence is a sequence in the gene exon; and
wherein the second parental insect comprises a nucleic acid that encodes an endonuclease under the control of a regulatory sequence that is suitable for directing protein expression in Drosophila suzukii or Aedes aegypti.

2. The mating system of claim 1,
wherein the targeted sequence required for female-specific viability in Aedes aegypti is selected from:
(Intersex1, SEQ ID NO: 58)
GCGGGATTCGCTCTCGACGA,
(Intersex2, SEQ ID NO: 59)
GGACAACATTTCCAAGGTTA,
(labrum (Lab) 5, SEQ ID NO: 60)
GCACTAGTGGGATATCCTGA,
or
(labrum (Lab) 4, SEQ ID NO: 61)
GTCCAGGAAGCATTTGGTAT;
wherein the targeted sequence required for male-specific fertility in Aedes aegypti is selected from:
(Zpg1, SEQ ID NO: 62)
GTGTAGACTGGCCCTAACGG,
(Zpg2, SEQ ID NO: 63)
TCTCGTTCCCCAAACACTTG,
(Zpg3, SEQ ID NO: 64)
TCATCAAGAACATGTTCAGG,
or
(Zpg4, SEQ ID NO: 65)
ACAGTTGGAACCGAACGCTG;
and
wherein the targeted sequence required for male-specific fertility in Drosophila suzukii is selected from:
(Cannonball (Can), SEQ ID NO: 66)
GCTACAGAGGAATGGCCCAG,
(Cannonball (Can), SEQ ID NO: 67)
GGATCGGGATAACCTGCCGT,
(meiosis I arrest (Mia), SEQ ID NO: 68)
GAGAATCCCCTTGTTGCGGG,
(meiosis I arrest (Mia), SEQ ID NO: 69)
GAGCTCTGACCATCCGCATG,
(P-element induced wimpy testis (PIWI),
SEQ ID NO: 70)
GGTGTTGGACAGCACATCGA,
(P-element induced wimpy testis (PIWI),
SEQ ID NO: 71)
GAGCACACGTGATCGCAAGA,
(Heterochromatin Protein 1e (HP1e), SEQ ID NO: 72)
CAACCTCAAgTTGTaCCAAG,
(Heterochromatin Protein 1e (HP1e), SEQ ID NO: 73)
GGATTATCCAAAACTAAGCA,
(zero population growth (Zpg), SEQ ID NO: 74)
GCAACTGCAAACGCATTCCG,
(zero population growth (Zpg), SEQ ID NO: 75)
GCCCAAGTTGCACCTGCAGG,
(male sterile (3) K81 (K81), SEQ ID NO: 76)
GATCACAGCGAGTTCTTCGG,
(male sterile (3) K81 (K81), SEQ ID NO: 77)
GGAGTTGGGGTCGTCGACAT,
(misfire (Mfr), SEQ ID NO: 78)
GGCGTCAAGTTCAAGAAGCA,
(misfire (Mfr), SEQ ID NO: 79)
GAGAACGGGACACTGGCAGG,
(sneaky (Snky), SEQ ID NO: 80)
GACTTCTCGTAGGTGCGCAA,
and
(sneaky (Snky), SEQ ID NO: 81)
GTAGGTGCGCAATGGTAAGA.

3. The mating system of claim 1,
wherein the regulatory sequence that is suitable for directing protein expression in Drosophila suzukii comprises a promoter selected from: nt 4360 to nt 6582 of SEQ ID NO: 1 or nt 4360 to nt 6600 of SEQ ID NO: 2 (874Z promoter sequence), nt 4366 to nt 4873 of SEQ ID NO: 3 (874S promoter sequence), nt 4366 to nt 7196 of SEQ ID NO: 4 (874R promoter sequence), nt 4366 to nt 6233 of SEQ ID NO: 5 (874W promoter sequence), or nt 4360 to nt 5291 of SEQ ID NO: 6 (874Z1 promoter sequence), optionally wherein the promoter comprises a sequence of nt 4366 to nt 6233 of SEQ ID NO: 5 (874W promoter sequence); and
wherein the regulatory sequence suitable for directing protein expression in Aedes aegypti mosquito comprises a promoter selected from nt 4366 to nt 6497 of SEQ ID NO: 22 (874L promoter sequence), nt 4366 to nt 6865 of SEQ ID NO: 23 or a fragment thereof comprising an AAEL007097 promoter (874M promoter sequence), nt 4366 to nt 7404 of SEQ ID NO: 24 (874N promoter sequence), nt 4366 to nt 7399 of SEQ ID NO: 25 (874P promoter sequence), or nt 4366 to nt 5751 of SEQ ID NO: 26 (874X promoter sequence), or nt 4366 to nt 4786 of SEQ ID NO: 27 (874Y promoter sequence) or nt 4363 to nt 7162 of SEQ ID NO: 28 (874Y3 promoter sequence), optionally wherein the promoter comprises a sequence of nt 4366 to nt 7399 of SEQ ID NO: 25 (874P promoter sequence) or wherein the promoter comprises a sequence of nt 4366 to nt 4786 of SEQ ID NO: 27 (874Y promoter sequence).

4. A mating system producing a genetically modified progeny that is a sterile male insect of Drosophila suzukii or Aedes aegypti mosquito, comprising a first parental insect and a second parental insect,
wherein the first parental insect comprises at least one nucleic acid sequence that comprises:
(a) at least a first guide RNA targeting a female essential genomic sequence that is required for female-specific viability in Drosophila suzukii or Aedes aegypti, and
(b) at least a second guide RNA targeting a male sterility genomic sequence that is required for male-specific fertility in Drosophila suzukii or Aedes aegypti, wherein the targeted sequence required for female-specific viability in Drosophila suzukii is GGCGGCAGCGGCGGGAATGG (Sxl—Max Scott site, SEQ ID NO: 82) or wherein the targeted sequence required for male-specific fertility in Drosophila suzukii is selected from: TGGCGGTACCGGCTCCGGAA (Btub Original site 2, SEQ ID NO: 83), CTTGAGTGTGCACCAGCTGG (Btub site 2, SEQ ID NO: 84), CAATGCGGTAACCAGATCGG (Btub site 3, SEQ ID NO: 85), GCCTCGGGGTCTAAAGATGT (Btub site 4, SEQ ID NO: 86), GCTACAGAGGAATGGCCCAG (Cannonball (Can), SEQ ID NO: 66), GGATCGGGATAACCTGCCGT (Cannonball (Can), SEQ ID NO: 67), GAGAATCCCCTTGTTGCGGG (meiosis I arrest (Mia), SEQ ID NO: 68), GAGCTCTGACCATCCGCATG (meiosis I arrest (Mia), SEQ ID NO: 69), GGTGTTGGACAGCACATCGA (P-element induced wimpy testis (PIWI), SEQ ID NO: 70), GAGCACACGTGATCGCAAGA (P-element induced wimpy testis (PIWI), SEQ ID NO: 71), CAACCTCAAgTTGTaCCAAG (Heterochromatin Protein 1e (HP1e), SEQ ID NO: 72), GGATTATCCAAAACTAAGCA (Heterochromatin Protein 1e (HP1e), SEQ ID NO: 73), GCAACTGCAAACGCATTCCG (zero population growth (Zpg), SEQ ID NO: 74), GCCCAAGTTGCACCTGCAGG (zero population growth (Zpg), SEQ ID NO: 75), GATCACAGCGAGTTCTTCGG (male sterile (3) K81 (K81), SEQ ID NO: 76), GGAGTTGGGGTCGTCGACAT male sterile (3) K81 (K81), SEQ ID NO: 77), GGCGTCAAGTTCAAGAAGCA (misfire (Mfr), SEQ ID NO: 78), GAGAACGGGACACTGGCAGG (misfire (Mfr), SEQ ID NO: 79), GACTTCTCGTAGGTGCGCAA (sneaky (Snky), SEQ ID NO: 80), or GTAGGTGCGCAATGGTAAGA (sneaky (Snky), SEQ ID NO: 81), and
wherein the targeted sequence required for female-specific viability in Aedes aegypti is selected from: AGCGACATGCAGCCATTCTG (double sex (Dsx) 1, SEQ ID NO: 87 in the revised plasmid), CTCACAAGTAGAGCTACACG (Dsx2, SEQ ID NO: 88 in the revised plasmid), GGTAGCTGGCCGTTGCCAAA (Dsx3, SEQ ID NO: 89 in the revised plasmid), CTGTCGTCGTTTTTTTCCGG (Dsx4, SEQ ID NO: 90 in the revised plasmid), GGATATTGGTACGACCCGGG (Dsx5, SEQ ID NO: 91), GCGGGATTCGCTCTCGACGA (Intersex1, SEQ ID NO: 58), GGACAACATTTCCAAGGTTA (Intersex2, SEQ ID NO: 59), GCACTAGTGGGATATCCTGA (labrum (Lab) 5, SEQ ID NO: 60), GTCCAGGAAGCATTTGGTAT (labrum (Lab) 4, SEQ ID NO: 61), GTATTCGATGTTCTCCACC (sister of sex lethal (Slx) 4, SEQ ID NO: 92), GAAGGCATATCAAACATTCG (sister of sex lethal (Slx) 5, SEQ ID NO: 93), GTTAAGAACTCGGCCATCGA (homeotic protein Proboscipedia (Pb) 1, SEQ ID NO: 94), GCAAGTTAAGCCTGAAACAA (homeotic protein Proboscipedia (Pb) 2, SEQ ID NO: 95), or wherein the targeted sequence required for male-specific fertility in Aedes aegypti is selected from: TACTACAACGAGGCTACCGG (Btub1, SEQ ID NO: 96), GTCTCCGCAATACGCCCCGG (Btub2, SEQ ID NO: 97), GATAGGAGCCAAGTTCTGGG (Btub3, SEQ ID NO: 98), CACTATGGATTCGGTCCGAG (Btub4, SEQ ID NO: 99), GTGTAGACTGGCCCTAACGG (zero population growth (Zpg)1, SEQ ID NO: 62), TCTCGTTCCCCAAACACTTG (Zpg2, SEQ ID NO: 63), TCATCAAGAACATGTTCAGG (Zpg3, SEQ ID NO: 64), ACAGTTGGAACCGAACGCTG (Zpg4, SEQ ID NO: 65); and
wherein the second parental insect comprises a nucleic acid that encodes an endonuclease under the control of a regulatory sequence that is suitable for directing protein expression in Drosophila suzukii or Aedes aegypti.

5. The mating system of claim 4,
wherein the regulatory sequence that is suitable for directing protein expression in Drosophila suzukii comprises a promoter selected from: nt 4360 to nt 6582 of SEQ ID NO: 1 or nt 4360 to nt 6600 of SEQ ID NO: 2 (874Z promoter sequence), nt 4366 to nt 4873 of SEQ ID NO: 3 (874S promoter sequence), nt 4366 to nt 7196 of SEQ ID NO: 4 (874R promoter sequence), nt 4366 to nt 6233 of SEQ ID NO: 5 (874W promoter sequence), or nt 4360 to nt 5291 of SEQ ID NO: 6 (874Z1 promoter sequence), optionally wherein the promoter comprises a sequence of nt 4366 to nt 6233 of SEQ ID NO: 5 (874W promoter sequence); and
wherein the regulatory sequence suitable for directing protein expression in Aedes aegypti mosquito comprises a promoter selected from nt 4366 to nt 6497 of SEQ ID NO: 22 (874L promoter sequence), nt 4366 to nt 6865 of SEQ ID NO: 23 or a fragment thereof comprising an AAEL007097 promoter (874M promoter sequence), nt 4366 to nt 7404 of SEQ ID NO: 24 (874N promoter sequence), nt 4366 to nt 7399 of SEQ ID NO: 25 (874P promoter sequence), or nt 4366 to nt 5751 of SEQ ID NO: 26 (874X promoter sequence), or nt 4366 to nt 4786 of SEQ ID NO: 27 (874Y promoter sequence) or nt 4363 to nt 7162 of SEQ ID NO: 28 (874Y3 promoter sequence), optionally wherein the promoter comprises a sequence of nt 4366 to nt 7399 of SEQ ID NO: 25 (874P promoter sequence) or wherein the promoter comprises a sequence of nt 4366 to nt 4786 of SEQ ID NO: 27 (874Y promoter sequence).

6. A mating system producing a genetically modified progeny that is a sterile male insect of Drosophila suzukii, comprising a first parental insect and a second parental insect,
wherein the first parental Drosophila suzukii comprises at least one nucleic acid sequence that comprises:
(a) at least a first guide RNA targeting a female essential genomic sequence that is required for female-specific viability in Drosophila suzukii, and
(b) at least a second guide RNA targeting a male sterility genomic sequence that is required for male-specific fertility in Drosophila suzukii;
wherein the second parental insect comprises a nucleic acid that encodes an endonuclease under the control of a regulatory sequence that is suitable for directing protein expression in Drosophila suzukii, wherein the regulatory sequence comprises a promoter selected from a deadhead (Dhd) promoter or a bicoid (BicC) promoter.

7. The mating system of claim 6,
wherein the targeted sequence required for male-specific fertility in Drosophila suzukii is selected from a sequence of Cannonball (Can), meiosis I arrest (Mia), P-element induced wimpy testis (PIWI), Heterochromatin Protein 1e (HP1e), zero population growth (Zpg), male sterile (3) K81 (K81), misfire (Mfr), or sneaky (Snky).

8. The mating system of claim 6,
wherein the targeted sequence required for female-specific viability in Drosophila suzukii is GGCGGCAGCGGCGGGAATGG (Sxl—Max Scott site, SEQ ID NO: 82) or wherein the targeted sequence required for male-specific fertility in Drosophila suzukii is selected from: TGGCGGTACCGGCTCCGGAA (Btub Original site 2, SEQ ID NO: 83), CTTGAGTGTGCACCAGCTGG (Btub site 2, SEQ ID NO: 84), CAATGCGGTAACCAGATCGG (Btub site 3, SEQ ID NO: 85), GCCTCGGGGTCTAAAGATGT (Btub site 4, SEQ ID NO: 86), GCTACAGAGGAATGGCCCAG (Cannonball (Can), SEQ ID NO: 66), GGATCGGGATAACCTGCCGT (Cannonball (Can), SEQ ID NO: 67), GAGAATCCCCTTGTTGCGGG (meiosis I arrest (Mia), SEQ ID NO: 68), GAGCTCTGACCATCCGCATG (meiosis I arrest (Mia), SEQ ID NO: 69), GGTGTTGGACAGCACATCGA (P-element induced wimpy testis (PIWI), SEQ ID NO: 70), GAGCACACGTGATCGCAAGA (P-element induced wimpy testis (PIWI), SEQ ID NO: 71), CAACCTCAAgTTGTaCCAAG (Heterochromatin Protein 1e (HP1e), SEQ ID NO: 72), GGATTATCCAAAACTAAGCA (Heterochromatin Protein 1e (HP1e), SEQ ID NO: 73), GCAACTGCAAACGCATTCCG (zero population growth (Zpg), SEQ ID NO: 74), GCCCAAGTTGCACCTGCAGG (zero population growth (Zpg), SEQ ID NO: 75), GATCACAGCGAGTTCTTCGG (male sterile (3) K81 (K81), SEQ ID NO: 76), GGAGTTGGGGTCGTCGACAT male sterile (3) K81 (K81), SEQ ID NO: 77), GGCGTCAAGTTCAAGAAGCA (misfire (Mfr), SEQ ID NO: 78), GAGAACGGGACACTGGCAGG (misfire (Mfr), SEQ ID NO: 79), GACTTCTCGTAGGTGCGCAA (sneaky (Snky), SEQ ID NO: 80), or GTAGGTGCGCAATGGTAAGA (sneaky (Snky), SEQ ID NO: 81).

9. The mating system of claim 1, wherein the at least one nucleic acid sequence of the first parental Drosophila suzukii comprises GATTGTCAACTACTTGCCCC (Sex lethal (Sxl)—Nikolai site 1, SEQ ID NO: 100).

10. The mating system of claim 1, wherein the at least one nucleic acid sequence of the first parental Aedes aegypti comprises a set of guide RNAs, wherein the targeted sequences are Dsx1, intersex1, BTub3 and BTub2, or wherein the targeted sequences are Dsx1, Dsx5, BTub3, and BTub2, or wherein the targeted sequences are Zpg3, Zpg4, Dsx1, and Dsx1, or wherein the targeted sequences are Btub3, Btub2, Dsx1, and Dsx1, or wherein the targeted sequences are Dsx1, Dsx2, Dsx3, Dsx4, BTub3, and BTub2, or wherein the targeted sequences are Dsx1, intersex1, BTub3, BTub2, Dsx2, and Dsx4+.

11.-12. (canceled)

13. A method of producing a genetically modified progeny that is a sterile male insect of Drosophila suzukii or Aedes aegypti mosquito, comprising genetically crossing two parental insects of the mating system of claim 1, and producing and collecting the progeny of the parental insects.

14. The method of claim 13, further comprising an introduction step prior to the genetically crossing step, wherein the introduction step comprises one or both of the following:
introducing the at least one nucleic acid sequence to the first parental insect, or
introducing the nucleic acid that encodes an endonuclease under the control of a regulatory sequence to the second parental insect, and
optionally wherein either or both of the introduction integrates the sequence into the insect genome, and optionally wherein the progeny comprising the endonuclease, at least one first guide RNA, and at least one second guide RNA.

15. A progeny produced by the mating system of claim 1, optionally the progeny is an egg, a population of eggs, an insect, or a population of insects, and further optionally wherein the progeny is sterile male.

16. A method of reducing a wild-type insect population comprising introducing the progeny of claim 15 to the wild-type insect population.

17. A polynucleotide comprising a sequence encoding a Cas9 under the control of a deadhead (Dhd) promoter or a bicoid (BicC) promoter, optionally the polynucleotide is isolated or engineered, and further optionally wherein the polynucleotide is for use in the mating system of claim 1.

18. A polynucleotide or a sequence complementary thereto, optionally wherein the polynucleotide is an isolated or engineered polynucleotide, and wherein the polynucleotide comprises one or both of:
(a) at least a first guide RNA targeting a female essential genomic sequence that is required for female-specific viability in Drosophila suzukii or Aedes aegypti, and
(b) at least a second guide RNA targeting a male sterility genomic sequence that is required for male-specific fertility in Drosophila suzukii or Aedes aegypti,
wherein the targeted sequence required for female-specific viability in Aedes aegypti is selected from a sequence of the Intersex or labrum (Lab) gene or wherein the targeted sequence required for male-specific fertility in Aedes aegypti is a sequence of the zero population growth (Zpg)1 gene, optionally wherein the targeted sequence is a sequence in the gene exon, and
wherein the targeted sequence required for male-specific fertility in Drosophila suzukii is selected from a sequence of Cannonball (Can), meiosis I arrest (Mia), P-element induced wimpy testis (PIWI), Heterochromatin Protein 1e (HP1e), zero population growth (Zpg), male sterile (3) K81 (K81), misfire (Mfr), or sneaky (Snky), optionally wherein the targeted sequence is a sequence in the gene exon.

19. A polynucleotide or a sequence complementary thereto, optionally wherein the polynucleotide is an isolated or engineered polynucleotide, and wherein the polynucleotide comprises one or both of:
(a) a first guide RNA targeting a female essential genomic sequence that is required for female-specific viability in Drosophila suzukii or Aedes aegypti, and
(b) a second guide RNA targeting a male sterility genomic sequence that is required for male-specific fertility in Drosophila suzukii or Aedes aegypti,
wherein the targeted sequence required for female-specific viability in Drosophila suzukii is GGCGGCAGCGGCGGGAATGG (Sxl—Max Scott site, SEQ ID NO: 82) or wherein the targeted sequence required for male-specific fertility in Drosophila suzukii is selected from: TGGCGGTACCGGCTCCGGAA (Btub Original site 2, SEQ ID NO: 83), CTTGAGTGTGCACCAGCTGG (Btub site 2, SEQ ID NO: 84), CAATGCGGTAACCAGATCGG (Btub site 3, SEQ ID NO: 85), GCCTCGGGGTCTAAAGATGT (Btub site 4, SEQ ID NO: 86), GCTACAGAGGAATGGCCCAG (Cannonball (Can), SEQ ID NO: 66), GGATCGGGATAACCTGCCGT (Cannonball (Can), SEQ ID NO: 67), GAGAATCCCCTTGTTGCGGG (meiosis I arrest (Mia), SEQ ID NO: 68), GAGCTCTGACCATCCGCATG (meiosis I arrest (Mia), SEQ ID NO: 69), GGTGTTGGACAGCACATCGA (P-element induced wimpy testis (PIWI), SEQ ID NO: 70), GAGCACACGTGATCGCAAGA (P-element induced wimpy testis (PIWI), SEQ ID NO: 71), CAACCTCAAgTTGTaCCAAG (Heterochromatin Protein 1e (HP1e), SEQ ID NO: 72), GGATTATCCAAAACTAAGCA (Heterochromatin Protein 1e (HP1e), SEQ ID NO: 73), GCAACTGCAAACGCATTCCG (zero population growth (Zpg), SEQ ID NO: 74), GCCCAAGTTGCACCTGCAGG (zero population growth (Zpg), SEQ ID NO: 75), GATCACAGCGAGTTCTTCGG (male sterile (3) K81 (K81), SEQ ID NO: 76), GGAGTTGGGGTCGTCGACAT male sterile (3) K81 (K81), SEQ ID NO: 77), GGCGTCAAGTTCAAGAAGCA (misfire (Mfr), SEQ ID NO: 78), GAGAACGGGACACTGGCAGG (misfire (Mfr), SEQ ID NO: 79), GACTTCTCGTAGGTGCGCAA (sneaky (Snky), SEQ ID NO: 80), or GTAGGTGCGCAATGGTAAGA (sneaky (Snky), SEQ ID NO: 81), and
wherein the targeted sequence required for female-specific viability in Aedes aegypti is selected from: AGCGACATGCAGCCATTCTG (double sex (Dsx) 1, SEQ ID NO: 87 in the revised plasmid), CTCACAAGTAGAGCTACACG (Dsx2, SEQ ID NO: 88 in the revised plasmid), GGTAGCTGGCCGTTGCCAAA (Dsx3, SEQ ID NO: 89 in the revised plasmid), CTGTCGTCGTTTTTTTCCGG (Dsx4, SEQ ID NO: 90 in the revised plasmid), GGATATTGGTACGACCCGGG (Dsx5, SEQ ID NO: 91), GCGGGATTCGCTCTCGACGA (Intersex1, SEQ ID NO: 58), GGACAACATTTCCAAGGTTA (Intersex2, SEQ ID NO: 59), GCACTAGTGGGATATCCTGA (labrum (Lab) 5, SEQ ID NO: 60), GTCCAGGAAGCATTTGGTAT (labrum (Lab) 4, SEQ ID NO: 61), GTATTCGATGTTCTCCACC (sister of sex lethal (Slx) 4, SEQ ID NO: 92), GAAGGCATATCAAACATTCG (sister of sex lethal (Slx) 5, SEQ ID NO: 93), GTTAAGAACTCGGCCATCGA (homeotic protein Proboscipedia (Pb) 1, SEQ ID NO: 94), GCAAGTTAAGCCTGAAACAA (homeotic protein Proboscipedia (Pb) 2, SEQ ID NO: 95), or wherein the targeted sequence required for male-specific fertility in Aedes aegypti is selected from: TACTACAACGAGGCTACCGG (Btub1, SEQ ID NO: 96), GTCTCCGCAATACGCCCCGG (Btub2, SEQ ID NO: 97), GATAGGAGCCAAGTTCTGGG (Btub3, SEQ ID NO: 98), CACTATGGATTCGGTCCGAG (Btub4, SEQ ID NO: 99), GTGTAGACTGGCCCTAACGG (zero population growth (Zpg)1, SEQ ID NO: 62), TCTCGTTCCCCAAACACTTG (Zpg2, SEQ ID NO: 63), TCATCAAGAACATGTTCAGG (Zpg3, SEQ ID NO: 64), ACAGTTGGAACCGAACGCTG (Zpg4, SEQ ID NO: 65).

20. (canceled)

21. A cell comprising a polynucleotide of claim 17, optionally wherein the host cell is an insect cell, further optionally, wherein the cell is a Drosophila suzukii or Aedes aegypti mosquito cell, and yet further optionally wherein the host cell is an egg, a sperm or a zygote.

22. A Drosophila suzukii or Aedes aegypti mosquito comprising a polynucleotide of any one of claim 17.

23. A kit comprising a polynucleotide of claim 17.

The application's sequence listing, which the Patent Office published only in electronic form, follows.

SEQUENCE LISTING (100 sequences)

SEQ ID NO: 1 - DNA, 14971 bp, Artificial Sequence
  pBac-vasa-Cas9-2a-eGFP-p10-UTR-Opie2-dsRed-Modified
tatccacagaatcaggggataacgcaggaaagaacatgtgagcaaaaggccagcaaaaggccaggaaccgtaaaaaggccgcgttgctggcgtttttccataggctccgcccccctgacgagcatcacaaaaatcgacgctcaagtcagaggtggcgaaacccgacaggactataaagataccaggcgtttccccctggaagctccctcgtgcgctctcctgttccgaccctgccgcttaccggatacctgtccgcctttctcccttcgggaagcgtggcgctttctcaatgctcacgctgtaggtatctcagttcggtgtaggtcgttcgctccaagctgggctgtgtgcacgaaccccccgttcagcccgaccgctgcgccttatccggtaactatcgtcttgagtccaacccggtaagacacgacttatcgccactggcagcagccactggtaacaggattagcagagcgaggtatgtaggcggtgctacagagttcttgaagtggtggcctaactacggctacactagaaggacagtatttggtatctgcgctctgctgaagccagttaccttcggaaaaagagttggtagctcttgatccggcaaacaaaccaccgctggtagcggtggtttttttgtttgcaagcagcagattacgcgcagaaaaaaaggatctcaagaagatcctttgatcttttctacggggtctgacgctcagtggaacgaaaactcacgttaagggattttggtcatgagattatcaaaaaggatcttcacctagatccttttaaattaaaaatgaagttttaaatcaatctaaagtatatatgagtaaacttggtctgacagttaccaatgcttaatcagtgaggcacctatctcagcgatctgtctatttcgttcatccatagttgcctgactccccgtcgtgtagataactacgatacgggagggcttaccatctggccccagtgctgcaatgataccgcgagacccacgctcaccggctccagatttatcagcaataaaccagccagccggaagggccgagcgcagaagtggtcctgcaactttatccgcctccatccagtctattaattgttgccgggaagctagagtaagtagttcgccagttaatagtttgcgcaacgttgttgccattgctacaggcatcgtggtgtcacgctcgtcgtttggtatggcttcattcagctccggttcccaacgatcaaggcgagttacatgatcccccatgttgtgcaaaaaagcggttagctccttcggtcctccgatcgttgtcagaagtaagttggccgcagtgttatcactcatggttatggcagcactgcataattctcttactgtcatgccatccgtaagatgcttttctgtgactggtgagtactcaaccaagtcattctgagaatagtgtatgcggcgaccgagttgctcttgcccggcgtcaatacgggataataccgcgccacatagcagaactttaaaagtgctcatcattggaaaacgttcttcggggcgaaaactctcaaggatcttaccgctgttgagatccagttcgatgtaacccactcgtgcacccaactgatcttcagcatcttttactttcaccagcgtttctgggtgagcaaaaacaggaaggcaaaatgccgcaaaaaagggaataagggcgacacggaaatgttgaatactcatactcttcctttttcaatattattgaagcatttatcagggttattgtctcatgagcggatacatatttgaatgtatttagaaaaataaacaaataggggttccgcgcacatttccccgaaaagtgccacctgacgtctaagaaaccattattatcatgacattaacctataaaaataggcgtatcacgaggccctttcgtctcgcgcgtttcggtgatgacggtgaaaacctctgacacatgcagctcccggagacggtcacagcttgtctgtaagcggatgccgggagcagacaagcccgtcagggcgcgtcagcgggtgttggcgggtgtcggggctggcttaactatgcggcatcagagcagattgtactgagagtgcaccatatgcggtgtgaaataccgcacagatgcgtaaggagaaaataccgcatcaggcgccattcgccattcaggctgcgcaactgttgggaagggcgatcggtgcgggcctcttcgctattacgccagctggcgaaagggggatgtgctgcaaggcgattaagttgggtaacgccagggttttcccagtcacgacgttgtaaaacgacggccagtgccaagctttgtttaaaatataacaaaattgtgatcccacaaaatgaagtggggcaaaatcaaataattaactagtgtccgtaaacttgttggtcttcaactttttgaggaacacgttggacggcaaatcgtgactataacacaagttgatttaataattttagccaacacgtcgggctgcgtgttttttgcgctctgtgtacacgttgattaactggtcgattaaataatttaatttttggttcttctttaaatctgtgatgaaattttttaaaataactttaaattcttcattggtaaaaaatgccacgttttgcaacttgtgagggtctaatatgaggtcaaactcagtaggagttttatccaaaaaagaaaacatgattacgtctgtacacgaacgcgtattaacgcagagtgcaaagtataagagggttaaaaaatatattttacgcaccatatacgcatcgggttgatatcgttaatatggatcaatttgaacagttgattaacgtgtctctgctcaagtctttgatcaaaacgcaaatcgacgaaaatgtgtcggacaatatcaagtcgatgagcgaaaaactaaaaaggctagaatacgacaatctcacagacagcgttgagatatacggtattcacgacagcaggctgaataataaaaaaattagaaactattatttaaccctagaaagataatcatattgtgacgtacgttaaagataatcatgcgtaaaattgacgcatgtgttttatcggtctgtatatcgaggtttatttattaatttgaatagatattaagttttattatatttacacttacatactaataataaattcaacaaacaatttatttatgtttatttatttattaaaaaaaaacaaaaactcaaaatttcttctataaagtaacaaaacttttaaacattctctcttttacaaaaataaacttattttgtactttaaaaacagtcatgttgtattataaaataagtaattagcttaacttatacataatagaaacaaattatacttattagtcagtcagaaacaactttggcacatatcaatattatgctctcgacaaataacttttttgcattttttgcacgatgcatttgcctttcgccttattttagaggggcagtaagtacagtaagtacgttttttcattactggctcttcagtactgtcatctgatgtaccaggcacttcatttggcaaaatattagagatattatcgcgcaaatatctcttcaaagtaggagcttctaaacgcttacgcataaacgatgacgtcaggctcatgtaaaggtttctcataaattttttgcgactttgaaccttttctcccttgctactgacattatggctgtatataataaaagaatttatgcaggcaatgtttatcattccgtacaataatgccataggccacctattcgtcttcctactgcaggtcatcacagaacacatttggtctagcgtgtccactccgcctttagtttgattataatacataaccatttgcggtttaccggtactttcgttgatagaagcatcctcatcacaagatgataataagtataccatcttagctggcttcggtttatatgagacgagagtaaggggtccgtcaaaacaaaacatcgatgttcccactggcctggagcgactgtttttcagtacttccggtatctcgcgtttgtttgatcgcacggttcccacaatggttaattcgagctcgcccggggtcctaggtcgacgatgtaggtcacggtctcgaagccgcggtgcgggtgccagggcgtgcccttgggctccccgggcgcgtactccacctcacccatctggtccatcatgatgaacgggtcgaggtggcggtagttgatcccggcgaacgcgcggcgcaccgggaagccctcgccctcgaaaccgctgggcgcggtggtcacggtgagcacgggacgtgcgacggcgtcggcgggtgcggatacgcggggcagcgtcagcgggttctcgacggtcacggcgggcatgtcgacgcctgcagctggttgtaggtgcagttgcgcttcttgcacttggcgcacttgaggagatcggtcttggtgccctgcacggtggccagctgggcatcgttgatggcctccttgacgaacttctcgcgcagcttcttcatctcgtcgctggccatctcctccggcgtcattttggccagctgcttggcagtgacggcgccgcacataaagttgccgcgcaatccaggattcttggggtccttcagattggccacgcgtgacctaatgcgattcttgtacttcatatccgtgttattgaactcggagtaaatggcatcctccagttcggcggccatttcctccggctcaccgcatccctcgggcacttcgccaatcttcagtgcggtggccagcatttcgcggcatttgatgcggaccgcatctgtcatgccaccggagggaaacgaggtctgtgacgaggatgtcgagcctttcttctctttatccttggatgagctggatgaactggacttatccttgccggagattgacgacgacgacttggcggcactggtggacttcgaggcactgctgttgttggaggagccctccttagcggagctgttgttcggtgtggttggcgccgggctggccaggaagcgtttccagttcttgatcagcgtcttggccagagcgatcacctcgtcgtccttgctactcttgcgcagctcgtttacggtcatgccgatgcgcgttttggtcagaatgtcgagattgatgttaagcgtttgcagggccttcagcaggtccagagcctgatcctgtccctgtacggtggatatatgtatatttgtgacatgatgcgcggcacgttagctaatcccgatacttactgtgccgtcgctggccatcttgctcatcttcttttggattcgaaacacttcctcctccacgctcattttggcccacttaatttgatcagaggttaggttaactggcgtcggctgtcggctttaatcggtgctgcgggtctgcgacagttgtttatgcggaagccgggctatttctttttttccctccaataaatgttgtttactatttttttcgtttctgtattcgcagaacaagttgacagaacaccctaacgcgttttagtgttaccgggcggtggcttgtcaagaaataccttcccatggctaatacaattcccaactggaagtagtttgggtttcagaagtcaacagtgttaccgtattttaatgtacatctggcttttaagcgagtacacacacatagcattgcgatgttttttaaacttgcactgcttgcaagcaggggtccactgtatttcaatgaaagaacagcgtgttgggcgtttttgaattatactaattaccttcaataacaattccctatatatcacttagttttaataaataaatcgtttgagtgtggtctagagatgatttattatgatgaagtgcggttgttggggacaagcgggatacgtctgcgggtcaaatcggcggtgggacatagtgagagggcaacggcgaacaatcaccaacgcgccctggtacgcgagaaatgttgatatcgcacatgacctcagcatccaccttcagtttgagaacaaattaaatcaggcacataccagacaaccaggagaacactgaggaggcgtcatcaaagatatctttggacacgtggcataaacaagccaaactattatctaatcaatatttttatacaaattttgtatgtttccatgttatcttcgttgctcctgttagttactacgtttcatagcccttaaattggttgcttaacgtaaaataaaattatattgtataaaaataaagaggaattcacctataacaaacgaaaaagtaaataaataagaacttccccatgttaaaaatgccaccaccatctttacatataagtatgtacatatgaatgaatcacttaggttgcttgaatattacaatttcattaatagctaaatcacatttgatgtgttagtggaaaacggctatatatataaattatcgaaattgtgaatatcgaattgcgatagcacaatgggaaattccaccactagatttttggtacttttaacagatccttttcggttttgcgttgcgcgaagtgatctgaacttatcaaagtttgtaaggtaatacataaagtgaaaaagaattaatttgctcttgaaaggcaggccaaattaaaaaaaaaatatcaattcgagatggactataaggaccacgacggagactacaaggatcatgatattgattacaaagacgatgacgataagatggccccaaagaagaagcggaaggtcggtatccacggagtcccagcagccgacaagaagtacagcatcggcctggacatcggcaccaactctgtgggctgggccgtgatcaccgacgagtacaaggtgcccagcaagaaattcaaggtgctgggcaacaccgaccggcacagcatcaagaagaacctgatcggagccctgctgttcgacagcggcgaaacagccgaggccacccggctgaagagaaccgccagaagaagatacaccagacggaagaaccggatctgctatctgcaagagatcttcagcaacgagatggccaaggtggacgacagcttcttccacagactggaagagtccttcctggtggaagaggataagaagcacgagcggcaccccatcttcggcaacatcgtggacgaggtggcctaccacgagaagtaccccaccatctaccacctgagaaagaaactggtggacagcaccgacaaggccgacctgcggctgatctatctggccctggcccacatgatcaagttccggggccacttcctgatcgagggcgacctgaaccccgacaacagcgacgtggacaagctgttcatccagctggtgcagacctacaaccagctgttcgaggaaaaccccatcaacgccagcggcgtggacgccaaggccatcctgtctgccagactgagcaagagcagacggctggaaaatctgatcgcccagctgcccggcgagaagaagaatggcctgttcggaaacctgattgccctgagcctgggcctgacccccaacttcaagagcaacttcgacctggccgaggatgccaaactgcagctgagcaaggacacctacgacgacgacctggacaacctgctggcccagatcggcgaccagtacgccgacctgtttctggccgccaagaacctgtccgacgccatcctgctgagcgacatcctgagagtgaacaccgagatcaccaaggcccccctgagcgcctctatgatcaagagatacgacgagcaccaccaggacctgaccctgctgaaagctctcgtgcggcagcagctgcctgagaagtacaaagagattttcttcgaccagagcaagaacggctacgccggctacattgacggcggagccagccaggaagagttctacaagttcatcaagcccatcctggaaaagatggacggcaccgaggaactgctcgtgaagctgaacagagaggacctgctgcggaagcagcggaccttcgacaacggcagcatcccccaccagatccacctgggagagctgcacgccattctgcggcggcaggaagatttttacccattcctgaaggacaaccgggaaaagatcgagaagatcctgaccttccgcatcccctactacgtgggccctctggccaggggaaacagcagattcgcctggatgaccagaaagagcgaggaaaccatcaccccctggaacttcgaggaagtggtggacaagggcgcttccgcccagagcttcatcgagcggatgaccaacttcgataagaacctgcccaacgagaaggtgctgcccaagcacagcctgctgtacgagtacttcaccgtgtataacgagctgaccaaagtgaaatacgtgaccgagggaatgagaaagcccgccttcctgagcggcgagcagaaaaaggccatcgtggacctgctgttcaagaccaaccggaaagtgaccgtgaagcagctgaaagaggactacttcaagaaaatcgagtgcttcgactccgtggaaatctccggcgtggaagatcggttcaacgcctccctgggcacataccacgatctgctgaaaattatcaaggacaaggacttcctggacaatgaggaaaacgaggacattctggaagatatcgtgctgaccctgacactgtttgaggacagagagatgatcgaggaacggctgaaaacctatgcccacctgttcgacgacaaagtgatgaagcagctgaagcggcggagatacaccggctggggcaggctgagccggaagctgatcaacggcatccgggacaagcagtccggcaagacaatcctggatttcctgaagtccgacggcttcgccaacagaaacttcatgcagctgatccacgacgacagcctgacctttaaagaggacatccagaaagcccaggtgtccggccagggcgatagcctgcacgagcacattgccaatctggccggcagccccgccattaagaagggcatcctgcagacagtgaaggtggtggacgagctcgtgaaagtgatgggccggcacaagcccgagaacatcgtgatcgaaatggccagagagaaccagaccacccagaagggacagaagaacagccgcgagagaatgaagcggatcgaagagggcatcaaagagctgggcagccagatcctgaaagaacaccccgtggaaaacacccagctgcagaacgagaagctgtacctgtactacctgcagaatgggcgggatatgtacgtggaccaggaactggacatcaaccggctgtccgactacgatgtggaccatatcgtgcctcagagctttctgaaggacgactccatcgacaacaaggtgctgaccagaagcgacaagaaccggggcaagagcgacaacgtgccctccgaagaggtcgtgaagaagatgaagaactactggcggcagctgctgaacgccaagctgattacccagagaaagttcgacaatctgaccaaggccgagagaggcggcctgagcgaactggataaggccggcttcatcaagagacagctggtggaaacccggcagatcacaaagcacgtggcacagatcctggactcccggatgaacactaagtacgacgagaatgacaagctgatccgggaagtgaaagtgatcaccctgaagtccaagctggtgtccgatttccggaaggatttccagttttacaaagtgcgcgagatcaacaactaccaccacgcccacgacgcctacctgaacgccgtcgtgggaaccgccctgatcaaaaagtaccctaagctggaaagcgagttcgtgtacggcgactacaaggtgtacgacgtgcggaagatgatcgccaagagcgagcaggaaatcggcaaggctaccgccaagtacttcttctacagcaacatcatgaactttttcaagaccgagattaccctggccaacggcgagatccggaagcggcctctgatcgagacaaacggcgaaaccggggagatcgtgtgggataagggccgggattttgccaccgtgcggaaagtgctgagcatgccccaagtgaatatcgtgaaaaagaccgaggtgcagacaggcggcttcagcaaagagtctatcctgcccaagaggaacagcgataagctgatcgccagaaagaaggactgggaccctaagaagtacggcggcttcgacagccccaccgtggcctattctgtgctggtggtggccaaagtggaaaagggcaagtccaagaaactgaagagtgtgaaagagctgctggggatcaccatcatggaaagaagcagcttcgagaagaatcccatcgactttctggaagccaagggctacaaagaagtgaaaaaggacctgatcatcaagctgcctaagtactccctgttcgagctggaaaacggccggaagagaatgctggcctctgccggcgaactgcagaagggaaacgaactggccctgccctccaaatatgtgaacttcctgtacctggccagccactatgagaagctgaagggctcccccgaggataatgagcagaaacagctgtttgtggaacagcacaagcactacctggacgagatcatcgagcagatcagcgagttctccaagagagtgatcctggccgacgctaatctggacaaagtgctgtccgcctacaacaagcaccgggataagcccatcagagagcaggccgagaatatcatccacctgtttaccctgaccaatctgggagcccctgccgccttcaagtactttgacaccaccatcgaccggaagaggtacaccagcaccaaagaggtgctggacgccaccctgatccaccagagcatcaccggcctgtacgagacacggatcgacctgtctcagctgggaggcgacaaaaggccggcggccacgaaaaaggccggccaggcaaaaaagaaaaaggagggcagaggaagtcttctaacatgcggtgacgtggaggagaatcccggccctatggtgagcaagggcgaggagctgttcaccggggtggtgcccatcctggtcgagctggacggcgacgtaaacggccacaagttcagcgtgtccggcgagggcgagggcgatgccacctacggcaagctgaccctgaagttcatctgcaccaccagcaagctgcccgtgccctggcccaccctcgtgaccaccctgacctacggcgtgcagtgcttcagccgctaccccgaccacatgaagcagcacgacttcttcaagtccgccatgcccgaaggctacgtccaggagcgcaccatcttcttcaaggacgacggcaactacaagacccgcgccgaggtgaagttcgagggcgacaccctggtgaaccgcatcgagctgaagggcatcgacttcaaggaggacggcaacatcctggggcacaagctggagtacaactacaacagccacaacgtctatatcatggccgacaagcagaagaacggcatcaaggtgaacttcaagatccgccacaacatcgaggacggcagcgtgcagctcgccgaccactaccagcagaacacccccatcggcgacggccccgtgctgctgcccgacaaccactacctgagcacccagtccgccctgagcaaagaccccaacgagaagcgcgatcacatggtcctgctggagttcgtgaccgccgccgggatcactctcggcatggacgagctgtacaagtaattaattaactagaatgaatcgtttttaaaataacaaatcaattgttttataatattcgtacgattctttgattatgtaataaaatgtgatcattaggaagattacgaaaaatataaaaaatatgagttctgtgtgtataacaaatgctgtaaacgccacaattgtgtttgttgcaaataaacccatgattatttgattaaaattgttgttttctttgttcatagacaatagtgtgttttgcctaaacgtgtactgcataaactccatgcgagtgtatagcgagctagtggctaacgcttgccccaccaaagtagattcgtcaaaatcctcaatttcatcaccctcctccaagtttaacatttggccgtcggaattaacttctaaagatgccacataatctaataaatgaaatagagattcaaacgtggcgtcatcgtccgtttcgaccatttccgaaaagaactcgggcataaactctatgatttctctggacgtggtgttgtcgaaactctcaaagtacgcagtcaggaacgtgcgcgacatgtcgtcgggaaactcgcgcggaaacatgttgttgtaaccgaacgggtcccatagcgccaaaaccaaatctgccagcgtcaatagaatgagcacgatgccgacaatggagctggcttggatagcgattcgagttaacggccggggcgcgcccatactcggtggcctccccaccaccaacttttttgcactgcaaaaaaacacgcttttgcacgcgggcccatacatagtacaaactctacgtttcgtagactattttacataaatagtctacaccgttgtatacgctccaaatacactaccacacattgaacctttttgcagtgcaaaaaagtacgtgtcggcagtcacgtaggccggccttatcgggtcgcgtcctgtcacgtacgaatcacattatcggaccggacgagtgttgtcttatcgtgacaggacgccagcttcctgtgttgctaaccgcagccggacgcaactccttatcggaacaggacgcgcctccatatcagccgcgcgttatctcatgcgcgtgaccggacacgaggcgcccgtcccgcttatcgcgcctataaatacagcccgcaacgatctggtaaacacagttgaacagcatctgttacagcgacacaacatgagccggtccaacaacgccaacgcgcccacgccatccaaccgccgccgcaacctgtctctggtgatggtgcgctcctccaagaacgtcatcaaggagttcatgcgcttcaaggtgcgcatggagggcaccgtgaacggccacgagttcgagatcgagggcgagggcgagggccgcccctacgagggccacaacaccgtgaagctgaaggtgaccaagggcggccccctgcccttcgcctgggacatcctgtccccccagttccagtacggctccaaggtgtacgtgaagcaccccgccgacatccccgactacaagaagctgtccttccccgagggcttcaagtgggagcgcgtgatgaacttcgaggacggcggcgtggtgaccgtgacccaggactcctccctgcaggacggctgcttcatctacaaggtgaagttcatcggcgtgaacttcccctccgacggccccgtaatgcagaagaagaccatgggctgggaggcctccaccgagcgcctgtacccccgcgacggcgtgctgaagggcgagatccacaaggccctgaagctgaaggacggcggccactacctggtggagttcaagtccatctacatggccaagaagcccgtgcagctgcccggctactactacgtggactccaagctggacatcacctcccacaacgaggactacaccatcgtggagcagtacgagcgcaccgagggccgccaccacctgttcctgtaggactctagatcataatcagccataccacatttgtagaggttttacttgctttaaaaaacctcccacacctccccctgaacctgaaacataaaatgaatgcaattgttgttgttaacttgtttattgcagcttataatggttacaaataaagcaatagcatcacaaatttcacaaataaagcatttttttcactgcattctagttgtggtttgtccaaactcatcaatgtatcttaaagcttctaggccggccgatctcggatctgacaatgttcagtgcagagactcggctacgcctcgtggactttgaagttgaccaacaatgtttattcttacctctaatagtcctctgtggcaaggtcaagattctgttagaagccaatgaagaacctggttgttcaataacattttgttcgtctaatatttcactaccgcttgacgttggctgcacttcatgtacctcatctataaacgcttcttctgtatcgctctggacgtcatcttcacttacgtgatctgatatttcactgtcagaatcctcaccaacaagctcgtcatcgctttgcagaagagcagagaggatatgctcatcgtctaaagaactacccattttattatatattagtcacgatatctataacaagaaaatatatatataataagttatcacgtaagtagaacatgaaataacaatataattatcgtatgagttaaatcttaaaagtcacgtaaaagataatcatgcgtcattttgactcacgcggtcgttatagttcaaaatcagtgacacttaccgcattgacaagcacgcctcacgggagctccaagcggcgactgagatgtcctaaatgcacagcgacggattcgcgctatttagaaagagagagcaatatttcaagaatgcatgcgtcaattttacgcagactatctttctagggttaaaaaagatttgcgctttactcgacctaaactttaaacacgtcatagaatcttcgtttgacaaaaaccacattgtggccaagctgtgtgacgcgacgcgcgctaaagaatggcaaaccaagtcgcgcgagcgtcgactctagaggatccccgggtaccgagctcgaattcgtaatcatggtcatagctgtttcctgtgtgaaattgttatccgctcacaattccacacaacatacgagccggaagcataaagtgtaaagcctggggtgcctaatgagtgagctaactcacattaattgcgttgcgctcactgcccgctttccagtcgggaaacctgtcgtgccagctgcattaatgaatcggccaacgcgcggggagaggcggtttgcgtattgggcgctcttccgcttcctcgctcactgactcgctgcgctcggtcgttcggctgcggcgagcggtatcagctcactcaaaggcggtaatacggt

SEQ ID NO: 2 - DNA, 14989 bp, Artificial Sequence
  pBac-vasa-Cas9-2a-eGFP-p10-UTR-Opie2-dsRed
tatccacagaatcaggggataacgcaggaaagaacatgtgagcaaaaggccagcaaaaggccaggaaccgtaaaaaggccgcgttgctggcgtttttccataggctccgcccccctgacgagcatcacaaaaatcgacgctcaagtcagaggtggcgaaacccgacaggactataaagataccaggcgtttccccctggaagctccctcgtgcgctctcctgttccgaccctgccgcttaccggatacctgtccgcctttctcccttcgggaagcgtggcgctttctcaatgctcacgctgtaggtatctcagttcggtgtaggtcgttcgctccaagctgggctgtgtgcacgaaccccccgttcagcccgaccgctgcgccttatccggtaactatcgtcttgagtccaacccggtaagacacgacttatcgccactggcagcagccactggtaacaggattagcagagcgaggtatgtaggcggtgctacagagttcttgaagtggtggcctaactacggctacactagaaggacagtatttggtatctgcgctctgctgaagccagttaccttcggaaaaagagttggtagctcttgatccggcaaacaaaccaccgctggtagcggtggtttttttgtttgcaagcagcagattacgcgcagaaaaaaaggatctcaagaagatcctttgatcttttctacggggtctgacgctcagtggaacgaaaactcacgttaagggattttggtcatgagattatcaaaaaggatcttcacctagatccttttaaattaaaaatgaagttttaaatcaatctaaagtatatatgagtaaacttggtctgacagttaccaatgcttaatcagtgaggcacctatctcagcgatctgtctatttcgttcatccatagttgcctgactccccgtcgtgtagataactacgatacgggagggcttaccatctggccccagtgctgcaatgataccgcgagacccacgctcaccggctccagatttatcagcaataaaccagccagccggaagggccgagcgcagaagtggtcctgcaactttatccgcctccatccagtctattaattgttgccgggaagctagagtaagtagttcgccagttaatagtttgcgcaacgttgttgccattgctacaggcatcgtggtgtcacgctcgtcgtttggtatggcttcattcagctccggttcccaacgatcaaggcgagttacatgatcccccatgttgtgcaaaaaagcggttagctccttcggtcctccgatcgttgtcagaagtaagttggccgcagtgttatcactcatggttatggcagcactgcataattctcttactgtcatgccatccgtaagatgcttttctgtgactggtgagtactcaaccaagtcattctgagaatagtgtatgcggcgaccgagttgctcttgcccggcgtcaatacgggataataccgcgccacatagcagaactttaaaagtgctcatcattggaaaacgttcttcggggcgaaaactctcaaggatcttaccgctgttgagatccagttcgatgtaacccactcgtgcacccaactgatcttcagcatcttttactttcaccagcgtttctgggtgagcaaaaacaggaaggcaaaatgccgcaaaaaagggaataagggcgacacggaaatgttgaatactcatactcttcctttttcaatattattgaagcatttatcagggttattgtctcatgagcggatacatatttgaatgtatttagaaaaataaacaaataggggttccgcgcacatttccccgaaaagtgccacctgacgtctaagaaaccattattatcatgacattaacctataaaaataggcgtatcacgaggccctttcgtctcgcgcgtttcggtgatgacggtgaaaacctctgacacatgcagctcccggagacggtcacagcttgtctgtaagcggatgccgggagcagacaagcccgtcagggcgcgtcagcgggtgttggcgggtgtcggggctggcttaactatgcggcatcagagcagattgtactgagagtgcaccatatgcggtgtgaaataccgcacagatgcgtaaggagaaaataccgcatcaggcgccattcgccattcaggctgcgcaactgttgggaagggcgatcggtgcgggcctcttcgctattacgccagctggcgaaagggggatgtgctgcaaggcgattaagttgggtaacgccagggttttcccagtcacgacgttgtaaaacgacggccagtgccaagctttgtttaaaatataacaaaattgtgatcccacaaaatgaagtggggcaaaatcaaataattaactagtgtccgtaaacttgttggtcttcaactttttgaggaacacgttggacggcaaatcgtgactataacacaagttgatttaataattttagccaacacgtcgggctgcgtgttttttgcgctctgtgtacacgttgattaactggtcgattaaataatttaatttttggttcttctttaaatctgtgatgaaattttttaaaataactttaaattcttcattggtaaaaaatgccacgttttgcaacttgtgagggtctaatatgaggtcaaactcagtaggagttttatccaaaaaagaaaacatgattacgtctgtacacgaacgcgtattaacgcagagtgcaaagtataagagggttaaaaaatatattttacgcaccatatacgcatcgggttgatatcgttaatatggatcaatttgaacagttgattaacgtgtctctgctcaagtctttgatcaaaacgcaaatcgacgaaaatgtgtcggacaatatcaagtcgatgagcgaaaaactaaaaaggctagaatacgacaatctcacagacagcgttgagatatacggtattcacgacagcaggctgaataataaaaaaattagaaactattatttaaccctagaaagataatcatattgtgacgtacgttaaagataatcatgcgtaaaattgacgcatgtgttttatcggtctgtatatcgaggtttatttattaatttgaatagatattaagttttattatatttacacttacatactaataataaattcaacaaacaatttatttatgtttatttatttattaaaaaaaaacaaaaactcaaaatttcttctataaagtaacaaaacttttaaacattctctcttttacaaaaataaacttattttgtactttaaaaacagtcatgttgtattataaaataagtaattagcttaacttatacataatagaaacaaattatacttattagtcagtcagaaacaactttggcacatatcaatattatgctctcgacaaataacttttttgcattttttgcacgatgcatttgcctttcgccttattttagaggggcagtaagtacagtaagtacgttttttcattactggctcttcagtactgtcatctgatgtaccaggcacttcatttggcaaaatattagagatattatcgcgcaaatatctcttcaaagtaggagcttctaaacgcttacgcataaacgatgacgtcaggctcatgtaaaggtttctcataaattttttgcgactttgaaccttttctcccttgctactgacattatggctgtatataataaaagaatttatgcaggcaatgtttatcattccgtacaataatgccataggccacctattcgtcttcctactgcaggtcatcacagaacacatttggtctagcgtgtccactccgcctttagtttgattataatacataaccatttgcggtttaccggtactttcgttgatagaagcatcctcatcacaagatgataataagtataccatcttagctggcttcggtttatatgagacgagagtaaggggtccgtcaaaacaaaacatcgatgttcccactggcctggagcgactgtttttcagtacttccggtatctcgcgtttgtttgatcgcacggttcccacaatggttaattcgagctcgcccggggtcctaggtcgacgatgtaggtcacggtctcgaagccgcggtgcgggtgccagggcgtgcccttgggctccccgggcgcgtactccacctcacccatctggtccatcatgatgaacgggtcgaggtggcggtagttgatcccggcgaacgcgcggcgcaccgggaagccctcgccctcgaaaccgctgggcgcggtggtcacggtgagcacgggacgtgcgacggcgtcggcgggtgcggatacgcggggcagcgtcagcgggttctcgacggtcacggcgggcatgtcgacgcctgcagctggttgtaggtgcagttgcgcttcttgcacttggcgcacttgaggagatcggtcttggtgccctgcacggtggccagctgggcatcgttgatggcctccttgacgaacttctcgcgcagcttcttcatctcgtcgctggccatctcctccggcgtcattttggccagctgcttggcagtgacggcgccgcacataaagttgccgcgcaatccaggattcttggggtccttcagattggccacgcgtgacctaatgcgattcttgtacttcatatccgtgttattgaactcggagtaaatggcatcctccagttcggcggccatttcctccggctcaccgcatccttcgggcacttcaccaatcttcagtgcggtggccagcatttcgcggcatttgatgcggaccgcatctgtcatgccgccggagggaaacgaggtctgtgacgaggatgtcgagcctttcttctctttatccttggatgagctggatgaactggacttatccttgccggagattgacgacgacgacttggcggcactggtggacttcgaggcactgctgttgttggaggagccctccttagcggagctgttgttcggtgtggttggcgccgggctggcgaggaatcgtttccagttcttgatcagcgtcttggccagagcgatcacctcgtcgtccttgctactcttgcgcagctcgtttacggtcatgccgatgcgcgttttggtcagaatgtcgagattgatgttaagcgtttgcagggccttcagcaggtccagagcctgatcctgtccctgtacggtggatatatgtatatttgtgacatgatgcgcggcacgttagctaatcccgatacttactgtgccgtcgctggccatcttgctcatcttcttttggattcgaaacacttcctcctccacgctcattttggcccacttaatttgatcagaggttaggttaactggcgtcggctgtcggctttaatcggtgctgcgggtctgcgacagttgtttatgcggaagccgggctatttctttttttccctccaataaatgttgtttactatttttttcgtttctgtattcgcagaacgagttgacagaacaccctaacgcgttttagtgttaccgggcggtggcttgtcaagaaatgccttcccatggctaatacaattcccaactggaagtagtttgggtttcagaagtcaacagtgttaccgtattttaatgtacatctggcttttaagcgagtacacacacatagcattgcgatgttttttaaacttgcactgcttgcaagcagggctccactgtatttcaatgaaagaacagcgtgttgggcgtttttgaattatactaattaccttcaataacaattccctatatatcacttagttttaataaataaatcgtttgagtgtggtctagagatgatgtattatgatgaagtgcggttgttggggacaagcgggatacgtctgcgggtcaaatcggcggtgggacatagtgagagggcaacggctccaaaaccaagcgttgcgaacaatcaccaacgcgccctggtacgcgagaaatgttgatatcgcacatgacctcagcatccaccttcagtttgagaacaaattaaatcaggcacataccagacaaccaggagaacactgaggaggcgtcatcaaagatatctttggacacgtggcataaacaagccaaactattatctaatcaatatttttatacaaattttgtatgtttccatgttatcttcgttgctcctgttagttactacgtttcatagcccttaaattggttgcttaacgtaaaataaaattatattgtataaaaataaagaggaattcacctataacaaacgaaaaagtaaataaataagaacttccccatgttaaaaatgccaccaccatctttacatataagtatgtacatatgaatgaatcacttaggttgcttgaatattacaatttcattaatagctaaatcacatttgatgtgttagtggaaaacggctatatatataaattatcgaaattgtgaatatcgaattgcgatagcacaatgggaaattccaccactagatttttggtacttttaacagatccttttcggttttgcgttgcgcgaagtgatctgaacttatcaaagtttgtaaggtaatacataaagtgaaaaagaattaatttgctcttgaaaggcaggccaaattaaaaaaaaaatatcaattcgagatggactataaggaccacgacggagactacaaggatcatgatattgattacaaagacgatgacgataagatggccccaaagaagaagcggaaggtcggtatccacggagtcccagcagccgacaagaagtacagcatcggcctggacatcggcaccaactctgtgggctgggccgtgatcaccgacgagtacaaggtgcccagcaagaaattcaaggtgctgggcaacaccgaccggcacagcatcaagaagaacctgatcggagccctgctgttcgacagcggcgaaacagccgaggccacccggctgaagagaaccgccagaagaagatacaccagacggaagaaccggatctgctatctgcaagagatcttcagcaacgagatggccaaggtggacgacagcttcttccacagactggaagagtccttcctggtggaagaggataagaagcacgagcggcaccccatcttcggcaacatcgtggacgaggtggcctaccacgagaagtaccccaccatctaccacctgagaaagaaactggtggacagcaccgacaaggccgacctgcggctgatctatctggccctggcccacatgatcaagttccggggccacttcctgatcgagggcgacctgaaccccgacaacagcgacgtggacaagctgttcatccagctggtgcagacctacaaccagctgttcgaggaaaaccccatcaacgccagcggcgtggacgccaaggccatcctgtctgccagactgagcaagagcagacggctggaaaatctgatcgcccagctgcccggcgagaagaagaatggcctgttcggaaacctgattgccctgagcctgggcctgacccccaacttcaagagcaacttcgacctggccgaggatgccaaactgcagctgagcaaggacacctacgacgacgacctggacaacctgctggcccagatcggcgaccagtacgccgacctgtttctggccgccaagaacctgtccgacgccatcctgctgagcgacatcctgagagtgaacaccgagatcaccaaggcccccctgagcgcctctatgatcaagagatacgacgagcaccaccaggacctgaccctgctgaaagctctcgtgcggcagcagctgcctgagaagtacaaagagattttcttcgaccagagcaagaacggctacgccggctacattgacggcggagccagccaggaagagttctacaagttcatcaagcccatcctggaaaagatggacggcaccgaggaactgctcgtgaagctgaacagagaggacctgctgcggaagcagcggaccttcgacaacggcagcatcccccaccagatccacctgggagagctgcacgccattctgcggcggcaggaagatttttacccattcctgaaggacaaccgggaaaagatcgagaagatcctgaccttccgcatcccctactacgtgggccctctggccaggggaaacagcagattcgcctggatgaccagaaagagcgaggaaaccatcaccccctggaacttcgaggaagtggtggacaagggcgcttccgcccagagcttcatcgagcggatgaccaacttcgataagaacctgcccaacgagaaggtgctgcccaagcacagcctgctgtacgagtacttcaccgtgtataacgagctgaccaaagtgaaatacgtgaccgagggaatgagaaagcccgccttcctgagcggcgagcagaaaaaggccatcgtggacctgctgttcaagaccaaccggaaagtgaccgtgaagcagctgaaagaggactacttcaagaaaatcgagtgcttcgactccgtggaaatctccggcgtggaagatcggttcaacgcctccctgggcacataccacgatctgctgaaaattatcaaggacaaggacttcctggacaatgaggaaaacgaggacattctggaagatatcgtgctgaccctgacactgtttgaggacagagagatgatcgaggaacggctgaaaacctatgcccacctgttcgacgacaaagtgatgaagcagctgaagcggcggagatacaccggctggggcaggctgagccggaagctgatcaacggcatccgggacaagcagtccggcaagacaatcctggatttcctgaagtccgacggcttcgccaacagaaacttcatgcagctgatccacgacgacagcctgacctttaaagaggacatccagaaagcccaggtgtccggccagggcgatagcctgcacgagcacattgccaatctggccggcagccccgccattaagaagggcatcctgcagacagtgaaggtggtggacgagctcgtgaaagtgatgggccggcacaagcccgagaacatcgtgatcgaaatggccagagagaaccagaccacccagaagggacagaagaacagccgcgagagaatgaagcggatcgaagagggcatcaaagagctgggcagccagatcctgaaagaacaccccgtggaaaacacccagctgcagaacgagaagctgtacctgtactacctgcagaatgggcgggatatgtacgtggaccaggaactggacatcaaccggctgtccgactacgatgtggaccatatcgtgcctcagagctttctgaaggacgactccatcgacaacaaggtgctgaccagaagcgacaagaaccggggcaagagcgacaacgtgccctccgaagaggtcgtgaagaagatgaagaactactggcggcagctgctgaacgccaagctgattacccagagaaagttcgacaatctgaccaaggccgagagaggcggcctgagcgaactggataaggccggcttcatcaagagacagctggtggaaacccggcagatcacaaagcacgtggcacagatcctggactcccggatgaacactaagtacgacgagaatgacaagctgatccgggaagtgaaagtgatcaccctgaagtccaagctggtgtccgatttccggaaggatttccagttttacaaagtgcgcgagatcaacaactaccaccacgcccacgacgcctacctgaacgccgtcgtgggaaccgccctgatcaaaaagtaccctaagctggaaagcgagttcgtgtacggcgactacaaggtgtacgacgtgcggaagatgatcgccaagagcgagcaggaaatcggcaaggctaccgccaagtacttcttctacagcaacatcatgaactttttcaagaccgagattaccctggccaacggcgagatccggaagcggcctctgatcgagacaaacggcgaaaccggggagatcgtgtgggataagggccgggattttgccaccgtgcggaaagtgctgagcatgccccaagtgaatatcgtgaaaaagaccgaggtgcagacaggcggcttcagcaaagagtctatcctgcccaagaggaacagcgataagctgatcgccagaaagaaggactgggaccctaagaagtacggcggcttcgacagccccaccgtggcctattctgtgctggtggtggccaaagtggaaaagggcaagtccaagaaactgaagagtgtgaaagagctgctggggatcaccatcatggaaagaagcagcttcgagaagaatcccatcgactttctggaagccaagggctacaaagaagtgaaaaaggacctgatcatcaagctgcctaagtactccctgttcgagctggaaaacggccggaagagaatgctggcctctgccggcgaactgcagaagggaaacgaactggccctgccctccaaatatgtgaacttcctgtacctggccagccactatgagaagctgaagggctcccccgaggataatgagcagaaacagctgtttgtggaacagcacaagcactacctggacgagatcatcgagcagatcagcgagttctccaagagagtgatcctggccgacgctaatctggacaaagtgctgtccgcctacaacaagcaccgggataagcccatcagagagcaggccgagaatatcatccacctgtttaccctgaccaatctgggagcccctgccgccttcaagtactttgacaccaccatcgaccggaagaggtacaccagcaccaaagaggtgctggacgccaccctgatccaccagagcatcaccggcctgtacgagacacggatcgacctgtctcagctgggaggcgacaaaaggccggcggccacgaaaaaggccggccaggcaaaaaagaaaaaggagggcagaggaagtcttctaacatgcggtgacgtggaggagaatcccggccctatggtgagcaagggcgaggagctgttcaccggggtggtgcccatcctggtcgagctggacggcgacgtaaacggccacaagttcagcgtgtccggcgagggcgagggcgatgccacctacggcaagctgaccctgaagttcatctgcaccaccagcaagctgcccgtgccctggcccaccctcgtgaccaccctgacctacggcgtgcagtgcttcagccgctaccccgaccacatgaagcagcacgacttcttcaagtccgccatgcccgaaggctacgtccaggagcgcaccatcttcttcaaggacgacggcaactacaagacccgcgccgaggtgaagttcgagggcgacaccctggtgaaccgcatcgagctgaagggcatcgacttcaaggaggacggcaacatcctggggcacaagctggagtacaactacaacagccacaacgtctatatcatggccgacaagcagaagaacggcatcaaggtgaacttcaagatccgccacaacatcgaggacggcagcgtgcagctcgccgaccactaccagcagaacacccccatcggcgacggccccgtgctgctgcccgacaaccactacctgagcacccagtccgccctgagcaaagaccccaacgagaagcgcgatcacatggtcctgctggagttcgtgaccgccgccgggatcactctcggcatggacgagctgtacaagtaattaattaactagaatgaatcgtttttaaaataacaaatcaattgttttataatattcgtacgattctttgattatgtaataaaatgtgatcattaggaagattacgaaaaatataaaaaatatgagttctgtgtgtataacaaatgctgtaaacgccacaattgtgtttgttgcaaataaacccatgattatttgattaaaattgttgttttctttgttcatagacaatagtgtgttttgcctaaacgtgtactgcataaactccatgcgagtgtatagcgagctagtggctaacgcttgccccaccaaagtagattcgtcaaaatcctcaatttcatcaccctcctccaagtttaacatttggccgtcggaattaacttctaaagatgccacataatctaataaatgaaatagagattcaaacgtggcgtcatcgtccgtttcgaccatttccgaaaagaactcgggcataaactctatgatttctctggacgtggtgttgtcgaaactctcaaagtacgcagtcaggaacgtgcgcgacatgtcgtcgggaaactcgcgcggaaacatgttgttgtaaccgaacgggtcccatagcgccaaaaccaaatctgccagcgtcaatagaatgagcacgatgccgacaatggagctggcttggatagcgattcgagttaacggccggggcgcgcccatactcggtggcctccccaccaccaacttttttgcactgcaaaaaaacacgcttttgcacgcgggcccatacatagtacaaactctacgtttcgtagactattttacataaatagtctacaccgttgtatacgctccaaatacactaccacacattgaacctttttgcagtgcaaaaaagtacgtgtcggcagtcacgtaggccggccttatcgggtcgcgtcctgtcacgtacgaatcacattatcggaccggacgagtgttgtcttatcgtgacaggacgccagcttcctgtgttgctaaccgcagccggacgcaactccttatcggaacaggacgcgcctccatatcagccgcgcgttatctcatgcgcgtgaccggacacgaggcgcccgtcccgcttatcgcgcctataaatacagcccgcaacgatctggtaaacacagttgaacagcatctgttacagcgacacaacatgagccggtccaacaacgccaacgcgcccacgccatccaaccgccgccgcaacctgtctctggtgatggtgcgctcctccaagaacgtcatcaaggagttcatgcgcttcaaggtgcgcatggagggcaccgtgaacggccacgagttcgagatcgagggcgagggcgagggccgcccctacgagggccacaacaccgtgaagctgaaggtgaccaagggcggccccctgcccttcgcctgggacatcctgtccccccagttccagtacggctccaaggtgtacgtgaagcaccccgccgacatccccgactacaagaagctgtccttccccgagggcttcaagtgggagcgcgtgatgaacttcgaggacggcggcgtggtgaccgtgacccaggactcctccctgcaggacggctgcttcatctacaaggtgaagttcatcggcgtgaacttcccctccgacggccccgtaatgcagaagaagaccatgggctgggaggcctccaccgagcgcctgtacccccgcgacggcgtgctgaagggcgagatccacaaggccctgaagctgaaggacggcggccactacctggtggagttcaagtccatctacatggccaagaagcccgtgcagctgcccggctactactacgtggactccaagctggacatcacctcccacaacgaggactacaccatcgtggagcagtacgagcgcaccgagggccgccaccacctgttcctgtaggactctagatcataatcagccataccacatttgtagaggttttacttgctttaaaaaacctcccacacctccccctgaacctgaaacataaaatgaatgcaattgttgttgttaacttgtttattgcagcttataatggttacaaataaagcaatagcatcacaaatttcacaaataaagcatttttttcactgcattctagttgtggtttgtccaaactcatcaatgtatcttaaagcttctaggccggccgatctcggatctgacaatgttcagtgcagagactcggctacgcctcgtggactttgaagttgaccaacaatgtttattcttacctctaatagtcctctgtggcaaggtcaagattctgttagaagccaatgaagaacctggttgttcaataacattttgttcgtctaatatttcactaccgcttgacgttggctgcacttcatgtacctcatctataaacgcttcttctgtatcgctctggacgtcatcttcacttacgtgatctgatatttcactgtcagaatcctcaccaacaagctcgtcatcgctttgcagaagagcagagaggatatgctcatcgtctaaagaactacccattttattatatattagtcacgatatctataacaagaaaatatatatataataagttatcacgtaagtagaacatgaaataacaatataattatcgtatgagttaaatcttaaaagtcacgtaaaagataatcatgcgtcattttgactcacgcggtcgttatagttcaaaatcagtgacacttaccgcattgacaagcacgcctcacgggagctccaagcggcgactgagatgtcctaaatgcacagcgacggattcgcgctatttagaaagagagagcaatatttcaagaatgcatgcgtcaattttacgcagactatctttctagggttaaaaaagatttgcgctttactcgacctaaactttaaacacgtcatagaatcttcgtttgacaaaaaccacattgtggccaagctgtgtgacgcgacgcgcgctaaagaatggcaaaccaagtcgcgcgagcgtcgactctagaggatccccgggtaccgagctcgaattcgtaatcatggtcatagctgtttcctgtgtgaaattgttatccgctcacaattccacacaacatacgagccggaagcataaagtgtaaagcctggggtgcctaatgagtgagctaactcacattaattgcgttgcgctcactgcccgctttccagtcgggaaacctgtcgtgccagctgcattaatgaatcggccaacgcgcggggagaggcggtttgcgtattgggcgctcttccgcttcctcgctcactgactcgctgcgctcggtcgttcggctgcggcgagcggtatcagctcactcaaaggcggtaatacggt

SEQ ID NO: 3 - DNA, 13263 bp, Artificial Sequence
  pBac-dmeDhd-Cas9-2a-eGFP-p10-UTR-Opie2-dsRed
tatccacagaatcaggggataacgcaggaaagaacatgtgagcaaaaggccagcaaaaggccaggaaccgtaaaaaggccgcgttgctggcgtttttccataggctccgcccccctgacgagcatcacaaaaatcgacgctcaagtcagaggtggcgaaacccgacaggactataaagataccaggcgtttccccctggaagctccctcgtgcgctctcctgttccgaccctgccgcttaccggatacctgtccgcctttctcccttcgggaagcgtggcgctttctcaatgctcacgctgtaggtatctcagttcggtgtaggtcgttcgctccaagctgggctgtgtgcacgaaccccccgttcagcccgaccgctgcgccttatccggtaactatcgtcttgagtccaacccggtaagacacgacttatcgccactggcagcagccactggtaacaggattagcagagcgaggtatgtaggcggtgctacagagttcttgaagtggtggcctaactacggctacactagaaggacagtatttggtatctgcgctctgctgaagccagttaccttcggaaaaagagttggtagctcttgatccggcaaacaaaccaccgctggtagcggtggtttttttgtttgcaagcagcagattacgcgcagaaaaaaaggatctcaagaagatcctttgatcttttctacggggtctgacgctcagtggaacgaaaactcacgttaagggattttggtcatgagattatcaaaaaggatcttcacctagatccttttaaattaaaaatgaagttttaaatcaatctaaagtatatatgagtaaacttggtctgacagttaccaatgcttaatcagtgaggcacctatctcagcgatctgtctatttcgttcatccatagttgcctgactccccgtcgtgtagataactacgatacgggagggcttaccatctggccccagtgctgcaatgataccgcgagacccacgctcaccggctccagatttatcagcaataaaccagccagccggaagggccgagcgcagaagtggtcctgcaactttatccgcctccatccagtctattaattgttgccgggaagctagagtaagtagttcgccagttaatagtttgcgcaacgttgttgccattgctacaggcatcgtggtgtcacgctcgtcgtttggtatggcttcattcagctccggttcccaacgatcaaggcgagttacatgatcccccatgttgtgcaaaaaagcggttagctccttcggtcctccgatcgttgtcagaagtaagttggccgcagtgttatcactcatggttatggcagcactgcataattctcttactgtcatgccatccgtaagatgcttttctgtgactggtgagtactcaaccaagtcattctgagaatagtgtatgcggcgaccgagttgctcttgcccggcgtcaatacgggataataccgcgccacatagcagaactttaaaagtgctcatcattggaaaacgttcttcggggcgaaaactctcaaggatcttaccgctgttgagatccagttcgatgtaacccactcgtgcacccaactgatcttcagcatcttttactttcaccagcgtttctgggtgagcaaaaacaggaaggcaaaatgccgcaaaaaagggaataagggcgacacggaaatgttgaatactcatactcttcctttttcaatattattgaagcatttatcagggttattgtctcatgagcggatacatatttgaatgtatttagaaaaataaacaaataggggttccgcgcacatttccccgaaaagtgccacctgacgtctaagaaaccattattatcatgacattaacctataaaaataggcgtatcacgaggccctttcgtctcgcgcgtttcggtgatgacggtgaaaacctctgacacatgcagctcccggagacggtcacagcttgtctgtaagcggatgccgggagcagacaagcccgtcagggcgcgtcagcgggtgttggcgggtgtcggggctggcttaactatgcggcatcagagcagattgtactgagagtgcaccatatgcggtgtgaaataccgcacagatgcgtaaggagaaaataccgcatcaggcgccattcgccattcaggctgcgcaactgttgggaagggcgatcggtgcgggcctcttcgctattacgccagctggcgaaagggggatgtgctgcaaggcgattaagttgggtaacgccagggttttcccagtcacgacgttgtaaaacgacggccagtgccaagctttgtttaaaatataacaaaattgtgatcccacaaaatgaagtggggcaaaatcaaataattaactagtgtccgtaaacttgttggtcttcaactttttgaggaacacgttggacggcaaatcgtgactataacacaagttgatttaataattttagccaacacgtcgggctgcgtgttttttgcgctctgtgtacacgttgattaactggtcgattaaataatttaatttttggttcttctttaaatctgtgatgaaattttttaaaataactttaaattcttcattggtaaaaaatgccacgttttgcaacttgtgagggtctaatatgaggtcaaactcagtaggagttttatccaaaaaagaaaacatgattacgtctgtacacgaacgcgtattaacgcagagtgcaaagtataagagggttaaaaaatatattttacgcaccatatacgcatcgggttgatatcgttaatatggatcaatttgaacagttgattaacgtgtctctgctcaagtctttgatcaaaacgcaaatcgacgaaaatgtgtcggacaatatcaagtcgatgagcgaaaaactaaaaaggctagaatacgacaatctcacagacagcgttgagatatacggtattcacgacagcaggctgaataataaaaaaattagaaactattatttaaccctagaaagataatcatattgtgacgtacgttaaagataatcatgcgtaaaattgacgcatgtgttttatcggtctgtatatcgaggtttatttattaatttgaatagatattaagttttattatatttacacttacatactaataataaattcaacaaacaatttatttatgtttatttatttattaaaaaaaaacaaaaactcaaaatttcttctataaagtaacaaaacttttaaacattctctcttttacaaaaataaacttattttgtactttaaaaacagtcatgttgtattataaaataagtaattagcttaacttatacataatagaaacaaattatacttattagtcagtcagaaacaactttggcacatatcaatattatgctctcgacaaataacttttttgcattttttgcacgatgcatttgcctttcgccttattttagaggggcagtaagtacagtaagtacgttttttcattactggctcttcagtactgtcatctgatgtaccaggcacttcatttggcaaaatattagagatattatcgcgcaaatatctcttcaaagtaggagcttctaaacgcttacgcataaacgatgacgtcaggctcatgtaaaggtttctcataaattttttgcgactttgaaccttttctcccttgctactgacattatggctgtatataataaaagaatttatgcaggcaatgtttatcattccgtacaataatgccataggccacctattcgtcttcctactgcaggtcatcacagaacacatttggtctagcgtgtccactccgcctttagtttgattataatacataaccatttgcggtttaccggtactttcgttgatagaagcatcctcatcacaagatgataataagtataccatcttagctggcttcggtttatatgagacgagagtaaggggtccgtcaaaacaaaacatcgatgttcccactggcctggagcgactgtttttcagtacttccggtatctcgcgtttgtttgatcgcacggttcccacaatggttaattcgagctcgcccggggtcctaggtcgacgatgtaggtcacggtctcgaagccgcggtgcgggtgccagggcgtgcccttgggctccccgggcgcgtactccacctcacccatctggtccatcatgatgaacgggtcgaggtggcggtagttgatcccggcgaacgcgcggcgcaccgggaagccctcgccctcgaaaccgctgggcgcggtggtcacggtgagcacgggacgtgcgacggcgtcggcgggtgcggatacgcggggcagcgtcagcgggttctcgacggtcacggcgggcatgtcgacgcggccgcttgcggccttcttggattgaaaaaaaagtgttttcaaatgtcagcggcgcggtgtgttgaggtgagtttggcttcgaacctaccacggctatggcaacactcgaggaaaatattagtactatgtcgtgtgacgccattattttgccataattacgataataatattcatatcgatatcgatagacctgccgtggtgaataagtatgttccccaccccccaacacactcggttggctttcccaacgacctggcaaccctaacacgcccgccattttgcactctccatgggccgccattttgtttagcggccacgcgagaattcagcatgcaaattggcgggaattccactctacacaccgccacttggagacccctataaagtcgcctacgcagccgccatttcaatcagttcacaatttgcagcgaaagcgccaacagccccatcacgtcaagttctttaatttaaaaaaaagaagaaaaacactttgctaatcctcgcgacataaaactcgagatggactataaggaccacgacggagactacaaggatcatgatattgattacaaagacgatgacgataagatggccccaaagaagaagcggaaggtcggtatccacggagtcccagcagccgacaagaagtacagcatcggcctggacatcggcaccaactctgtgggctgggccgtgatcaccgacgagtacaaggtgcccagcaagaaattcaaggtgctgggcaacaccgaccggcacagcatcaagaagaacctgatcggagccctgctgttcgacagcggcgaaacagccgaggccacccggctgaagagaaccgccagaagaagatacaccagacggaagaaccggatctgctatctgcaagagatcttcagcaacgagatggccaaggtggacgacagcttcttccacagactggaagagtccttcctggtggaagaggataagaagcacgagcggcaccccatcttcggcaacatcgtggacgaggtggcctaccacgagaagtaccccaccatctaccacctgagaaagaaactggtggacagcaccgacaaggccgacctgcggctgatctatctggccctggcccacatgatcaagttccggggccacttcctgatcgagggcgacctgaaccccgacaacagcgacgtggacaagctgttcatccagctggtgcagacctacaaccagctgttcgaggaaaaccccatcaacgccagcggcgtggacgccaaggccatcctgtctgccagactgagcaagagcagacggctggaaaatctgatcgcccagctgcccggcgagaagaagaatggcctgttcggaaacctgattgccctgagcctgggcctgacccccaacttcaagagcaacttcgacctggccgaggatgccaaactgcagctgagcaaggacacctacgacgacgacctggacaacctgctggcccagatcggcgaccagtacgccgacctgtttctggccgccaagaacctgtccgacgccatcctgctgagcgacatcctgagagtgaacaccgagatcaccaaggcccccctgagcgcctctatgatcaagagatacgacgagcaccaccaggacctgaccctgctgaaagctctcgtgcggcagcagctgcctgagaagtacaaagagattttcttcgaccagagcaagaacggctacgccggctacattgacggcggagccagccaggaagagttctacaagttcatcaagcccatcctggaaaagatggacggcaccgaggaactgctcgtgaagctgaacagagaggacctgctgcggaagcagcggaccttcgacaacggcagcatcccccaccagatccacctgggagagctgcacgccattctgcggcggcaggaagatttttacccattcctgaaggacaaccgggaaaagatcgagaagatcctgaccttccgcatcccctactacgtgggccctctggccaggggaaacagcagattcgcctggatgaccagaaagagcgaggaaaccatcaccccctggaacttcgaggaagtggtggacaagggcgcttccgcccagagcttcatcgagcggatgaccaacttcgataagaacctgcccaacgagaaggtgctgcccaagcacagcctgctgtacgagtacttcaccgtgtataacgagctgaccaaagtgaaatacgtgaccgagggaatgagaaagcccgccttcctgagcggcgagcagaaaaaggccatcgtggacctgctgttcaagaccaaccggaaagtgaccgtgaagcagctgaaagaggactacttcaagaaaatcgagtgcttcgactccgtggaaatctccggcgtggaagatcggttcaacgcctccctgggcacataccacgatctgctgaaaattatcaaggacaaggacttcctggacaatgaggaaaacgaggacattctggaagatatcgtgctgaccctgacactgtttgaggacagagagatgatcgaggaacggctgaaaacctatgcccacctgttcgacgacaaagtgatgaagcagctgaagcggcggagatacaccggctggggcaggctgagccggaagctgatcaacggcatccgggacaagcagtccggcaagacaatcctggatttcctgaagtccgacggcttcgccaacagaaacttcatgcagctgatccacgacgacagcctgacctttaaagaggacatccagaaagcccaggtgtccggccagggcgatagcctgcacgagcacattgccaatctggccggcagccccgccattaagaagggcatcctgcagacagtgaaggtggtggacgagctcgtgaaagtgatgggccggcacaagcccgagaacatcgtgatcgaaatggccagagagaaccagaccacccagaagggacagaagaacagccgcgagagaatgaagcggatcgaagagggcatcaaagagctgggcagccagatcctgaaagaacaccccgtggaaaacacccagctgcagaacgagaagctgtacctgtactacctgcagaatgggcgggatatgtacgtggaccaggaactggacatcaaccggctgtccgactacgatgtggaccatatcgtgcctcagagctttctgaaggacgactccatcgacaacaaggtgctgaccagaagcgacaagaaccggggcaagagcgacaacgtgccctccgaagaggtcgtgaagaagatgaagaactactggcggcagctgctgaacgccaagctgattacccagagaaagttcgacaatctgaccaaggccgagagaggcggcctgagcgaactggataaggccggcttcatcaagagacagctggtggaaacccggcagatcacaaagcacgtggcacagatcctggactcccggatgaacactaagtacgacgagaatgacaagctgatccgggaagtgaaagtgatcaccctgaagtccaagctggtgtccgatttccggaaggatttccagttttacaaagtgcgcgagatcaacaactaccaccacgcccacgacgcctacctgaacgccgtcgtgggaaccgccctgatcaaaaagtaccctaagctggaaagcgagttcgtgtacggcgactacaaggtgtacgacgtgcggaagatgatcgccaagagcgagcaggaaatcggcaaggctaccgccaagtacttcttctacagcaacatcatgaactttttcaagaccgagattaccctggccaacggcgagatccggaagcggcctctgatcgagacaaacggcgaaaccggggagatcgtgtgggataagggccgggattttgccaccgtgcggaaagtgctgagcatgccccaagtgaatatcgtgaaaaagaccgaggtgcagacaggcggcttcagcaaagagtctatcctgcccaagaggaacagcgataagctgatcgccagaaagaaggactgggaccctaagaagtacggcggcttcgacagccccaccgtggcctattctgtgctggtggtggccaaagtggaaaagggcaagtccaagaaactgaagagtgtgaaagagctgctggggatcaccatcatggaaagaagcagcttcgagaagaatcccatcgactttctggaagccaagggctacaaagaagtgaaaaaggacctgatcatcaagctgcctaagtactccctgttcgagctggaaaacggccggaagagaatgctggcctctgccggcgaactgcagaagggaaacgaactggccctgccctccaaatatgtgaacttcctgtacctggccagccactatgagaagctgaagggctcccccgaggataatgagcagaaacagctgtttgtggaacagcacaagcactacctggacgagatcatcgagcagatcagcgagttctccaagagagtgatcctggccgacgctaatctggacaaagtgctgtccgcctacaacaagcaccgggataagcccatcagagagcaggccgagaatatcatccacctgtttaccctgaccaatctgggagcccctgccgccttcaagtactttgacaccaccatcgaccggaagaggtacaccagcaccaaagaggtgctggacgccaccctgatccaccagagcatcaccggcctgtacgagacacggatcgacctgtctcagctgggaggcgacaaaaggccggcggccacgaaaaaggccggccaggcaaaaaagaaaaaggagggcagaggaagtcttctaacatgcggtgacgtggaggagaatcccggccctatggtgagcaagggcgaggagctgttcaccggggtggtgcccatcctggtcgagctggacggcgacgtaaacggccacaagttcagcgtgtccggcgagggcgagggcgatgccacctacggcaagctgaccctgaagttcatctgcaccaccagcaagctgcccgtgccctggcccaccctcgtgaccaccctgacctacggcgtgcagtgcttcagccgctaccccgaccacatgaagcagcacgacttcttcaagtccgccatgcccgaaggctacgtccaggagcgcaccatcttcttcaaggacgacggcaactacaagacccgcgccgaggtgaagttcgagggcgacaccctggtgaaccgcatcgagctgaagggcatcgacttcaaggaggacggcaacatcctggggcacaagctggagtacaactacaacagccacaacgtctatatcatggccgacaagcagaagaacggcatcaaggtgaacttcaagatccgccacaacatcgaggacggcagcgtgcagctcgccgaccactaccagcagaacacccccatcggcgacggccccgtgctgctgcccgacaaccactacctgagcacccagtccgccctgagcaaagaccccaacgagaagcgcgatcacatggtcctgctggagttcgtgaccgccgccgggatcactctcggcatggacgagctgtacaagtaattaattaactagaatgaatcgtttttaaaataacaaatcaattgttttataatattcgtacgattctttgattatgtaataaaatgtgatcattaggaagattacgaaaaatataaaaaatatgagttctgtgtgtataacaaatgctgtaaacgccacaattgtgtttgttgcaaataaacccatgattatttgattaaaattgttgttttctttgttcatagacaatagtgtgttttgcctaaacgtgtactgcataaactccatgcgagtgtatagcgagctagtggctaacgcttgccccaccaaagtagattcgtcaaaatcctcaatttcatcaccctcctccaagtttaacatttggccgtcggaattaacttctaaagatgccacataatctaataaatgaaatagagattcaaacgtggcgtcatcgtccgtttcgaccatttccgaaaagaactcgggcataaactctatgatttctctggacgtggtgttgtcgaaactctcaaagtacgcagtcaggaacgtgcgcgacatgtcgtcgggaaactcgcgcggaaacatgttgttgtaaccgaacgggtcccatagcgccaaaaccaaatctgccagcgtcaatagaatgagcacgatgccgacaatggagctggcttggatagcgattcgagttaacggccggggcgcgcccatactcggtggcctccccaccaccaacttttttgcactgcaaaaaaacacgcttttgcacgcgggcccatacatagtacaaactctacgtttcgtagactattttacataaatagtctacaccgttgtatacgctccaaatacactaccacacattgaacctttttgcagtgcaaaaaagtacgtgtcggcagtcacgtaggccggccttatcgggtcgcgtcctgtcacgtacgaatcacattatcggaccggacgagtgttgtcttatcgtgacaggacgccagcttcctgtgttgctaaccgcagccggacgcaactccttatcggaacaggacgcgcctccatatcagccgcgcgttatctcatgcgcgtgaccggacacgaggcgcccgtcccgcttatcgcgcctataaatacagcccgcaacgatctggtaaacacagttgaacagcatctgttacagcgacacaacatgagccggtccaacaacgccaacgcgcccacgccatccaaccgccgccgcaacctgtctctggtgatggtgcgctcctccaagaacgtcatcaaggagttcatgcgcttcaaggtgcgcatggagggcaccgtgaacggccacgagttcgagatcgagggcgagggcgagggccgcccctacgagggccacaacaccgtgaagctgaaggtgaccaagggcggccccctgcccttcgcctgggacatcctgtccccccagttccagtacggctccaaggtgtacgtgaagcaccccgccgacatccccgactacaagaagctgtccttccccgagggcttcaagtgggagcgcgtgatgaacttcgaggacggcggcgtggtgaccgtgacccaggactcctccctgcaggacggctgcttcatctacaaggtgaagttcatcggcgtgaacttcccctccgacggccccgtaatgcagaagaagaccatgggctgggaggcctccaccgagcgcctgtacccccgcgacggcgtgctgaagggcgagatccacaaggccctgaagctgaaggacggcggccactacctggtggagttcaagtccatctacatggccaagaagcccgtgcagctgcccggctactactacgtggactccaagctggacatcacctcccacaacgaggactacaccatcgtggagcagtacgagcgcaccgagggccgccaccacctgttcctgtaggactctagatcataatcagccataccacatttgtagaggttttacttgctttaaaaaacctcccacacctccccctgaacctgaaacataaaatgaatgcaattgttgttgttaacttgtttattgcagcttataatggttacaaataaagcaatagcatcacaaatttcacaaataaagcatttttttcactgcattctagttgtggtttgtccaaactcatcaatgtatcttaaagcttctaggccggccgatctcggatctgacaatgttcagtgcagagactcggctacgcctcgtggactttgaagttgaccaacaatgtttattcttacctctaatagtcctctgtggcaaggtcaagattctgttagaagccaatgaagaacctggttgttcaataacattttgttcgtctaatatttcactaccgcttgacgttggctgcacttcatgtacctcatctataaacgcttcttctgtatcgctctggacgtcatcttcacttacgtgatctgatatttcactgtcagaatcctcaccaacaagctcgtcatcgctttgcagaagagcagagaggatatgctcatcgtctaaagaactacccattttattatatattagtcacgatatctataacaagaaaatatatatataataagttatcacgtaagtagaacatgaaataacaatataattatcgtatgagttaaatcttaaaagtcacgtaaaagataatcatgcgtcattttgactcacgcggtcgttatagttcaaaatcagtgacacttaccgcattgacaagcacgcctcacgggagctccaagcggcgactgagatgtcctaaatgcacagcgacggattcgcgctatttagaaagagagagcaatatttcaagaatgcatgcgtcaattttacgcagactatctttctagggttaaaaaagatttgcgctttactcgacctaaactttaaacacgtcatagaatcttcgtttgacaaaaaccacattgtggccaagctgtgtgacgcgacgcgcgctaaagaatggcaaaccaagtcgcgcgagcgtcgactctagaggatccccgggtaccgagctcgaattcgtaatcatggtcatagctgtttcctgtgtgaaattgttatccgctcacaattccacacaacatacgagccggaagcataaagtgtaaagcctggggtgcctaatgagtgagctaactcacattaattgcgttgcgctcactgcccgctttccagtcgggaaacctgtcgtgccagctgcattaatgaatcggccaacgcgcggggagaggcggtttgcgtattgggcgctcttccgcttcctcgctcactgactcgctgcgctcggtcgttcggctgcggcgagcggtatcagctcactcaaaggcggtaatacggt

SEQ ID NO: 4 - DNA, 15588 bp, Artificial Sequence
  pBac-dmeBicC-Cas9-2a-eGFP-p10-UTR-Opie2-dsRed
tatccacagaatcaggggataacgcaggaaagaacatgtgagcaaaaggccagcaaaaggccaggaaccgtaaaaaggccgcgttgctggcgtttttccataggctccgcccccctgacgagcatcacaaaaatcgacgctcaagtcagaggtggcgaaacccgacaggactataaagataccaggcgtttccccctggaagctccctcgtgcgctctcctgttccgaccctgccgcttaccggatacctgtccgcctttctcccttcgggaagcgtggcgctttctcaatgctcacgctgtaggtatctcagttcggtgtaggtcgttcgctccaagctgggctgtgtgcacgaaccccccgttcagcccgaccgctgcgccttatccggtaactatcgtcttgagtccaacccggtaagacacgacttatcgccactggcagcagccactggtaacaggattagcagagcgaggtatgtaggcggtgctacagagttcttgaagtggtggcctaactacggctacactagaaggacagtatttggtatctgcgctctgctgaagccagttaccttcggaaaaagagttggtagctcttgatccggcaaacaaaccaccgctggtagcggtggtttttttgtttgcaagcagcagattacgcgcagaaaaaaaggatctcaagaagatcctttgatcttttctacggggtctgacgctcagtggaacgaaaactcacgttaagggattttggtcatgagattatcaaaaaggatcttcacctagatccttttaaattaaaaatgaagttttaaatcaatctaaagtatatatgagtaaacttggtctgacagttaccaatgcttaatcagtgaggcacctatctcagcgatctgtctatttcgttcatccatagttgcctgactccccgtcgtgtagataactacgatacgggagggcttaccatctggccccagtgctgcaatgataccgcgagacccacgctcaccggctccagatttatcagcaataaaccagccagccggaagggccgagcgcagaagtggtcctgcaactttatccgcctccatccagtctattaattgttgccgggaagctagagtaagtagttcgccagttaatagtttgcgcaacgttgttgccattgctacaggcatcgtggtgtcacgctcgtcgtttggtatggcttcattcagctccggttcccaacgatcaaggcgagttacatgatcccccatgttgtgcaaaaaagcggttagctccttcggtcctccgatcgttgtcagaagtaagttggccgcagtgttatcactcatggttatggcagcactgcataattctcttactgtcatgccatccgtaagatgcttttctgtgactggtgagtactcaaccaagtcattctgagaatagtgtatgcggcgaccgagttgctcttgcccggcgtcaatacgggataataccgcgccacatagcagaactttaaaagtgctcatcattggaaaacgttcttcggggcgaaaactctcaaggatcttaccgctgttgagatccagttcgatgtaacccactcgtgcacccaactgatcttcagcatcttttactttcaccagcgtttctgggtgagcaaaaacaggaaggcaaaatgccgcaaaaaagggaataagggcgacacggaaatgttgaatactcatactcttcctttttcaatattattgaagcatttatcagggttattgtctcatgagcggatacatatttgaatgtatttagaaaaataaacaaataggggttccgcgcacatttccccgaaaagtgccacctgacgtctaagaaaccattattatcatgacattaacctataaaaataggcgtatcacgaggccctttcgtctcgcgcgtttcggtgatgacggtgaaaacctctgacacatgcagctcccggagacggtcacagcttgtctgtaagcggatgccgggagcagacaagcccgtcagggcgcgtcagcgggtgttggcgggtgtcggggctggcttaactatgcggcatcagagcagattgtactgagagtgcaccatatgcggtgtgaaataccgcacagatgcgtaaggagaaaataccgcatcaggcgccattcgccattcaggctgcgcaactgttgggaagggcgatcggtgcgggcctcttcgctattacgccagctggcgaaagggggatgtgctgcaaggcgattaagttgggtaacgccagggttttcccagtcacgacgttgtaaaacgacggccagtgccaagctttgtttaaaatataacaaaattgtgatcccacaaaatgaagtggggcaaaatcaaataattaactagtgtccgtaaacttgttggtcttcaactttttgaggaacacgttggacggcaaatcgtgactataacacaagttgatttaataattttagccaacacgtcgggctgcgtgttttttgcgctctgtgtacacgttgattaactggtcgattaaataatttaatttttggttcttctttaaatctgtgatgaaattttttaaaataactttaaattcttcattggtaaaaaatgccacgttttgcaacttgtgagggtctaatatgaggtcaaactcagtaggagttttatccaaaaaagaaaacatgattacgtctgtacacgaacgcgtattaacgcagagtgcaaagtataagagggttaaaaaatatattttacgcaccatatacgcatcgggttgatatcgttaatatggatcaatttgaacagttgattaacgtgtctctgctcaagtctttgatcaaaacgcaaatcgacgaaaatgtgtcggacaatatcaagtcgatgagcgaaaaactaaaaaggctagaatacgacaatctcacagacagcgttgagatatacggtattcacgacagcaggctgaataataaaaaaattagaaactattatttaaccctagaaagataatcatattgtgacgtacgttaaagataatcatgcgtaaaattgacgcatgtgttttatcggtctgtatatcgaggtttatttattaatttgaatagatattaagttttattatatttacacttacatactaataataaattcaacaaacaatttatttatgtttatttatttattaaaaaaaaacaaaaactcaaaatttcttctataaagtaacaaaacttttaaacattctctcttttacaaaaataaacttattttgtactttaaaaacagtcatgttgtattataaaataagtaattagcttaacttatacataatagaaacaaattatacttattagtcagtcagaaacaactttggcacatatcaatattatgctctcgacaaataacttttttgcattttttgcacgatgcatttgcctttcgccttattttagaggggcagtaagtacagtaagtacgttttttcattactggctcttcagtactgtcatctgatgtaccaggcacttcatttggcaaaatattagagatattatcgcgcaaatatctcttcaaagtaggagcttctaaacgcttacgcataaacgatgacgtcaggctcatgtaaaggtttctcataaattttttgcgactttgaaccttttctcccttgctactgacattatggctgtatataataaaagaatttatgcaggcaatgtttatcattccgtacaataatgccataggccacctattcgtcttcctactgcaggtcatcacagaacacatttggtctagcgtgtccactccgcctttagtttgattataatacataaccatttgcggtttaccggtactttcgttgatagaagcatcctcatcacaagatgataataagtataccatcttagctggcttcggtttatatgagacgagagtaaggggtccgtcaaaacaaaacatcgatgttcccactggcctggagcgactgtttttcagtacttccggtatctcgcgtttgtttgatcgcacggttcccacaatggttaattcgagctcgcccggggtcctaggtcgacgatgtaggtcacggtctcgaagccgcggtgcgggtgccagggcgtgcccttgggctccccgggcgcgtactccacctcacccatctggtccatcatgatgaacgggtcgaggtggcggtagttgatcccggcgaacgcgcggcgcaccgggaagccctcgccctcgaaaccgctgggcgcggtggtcacggtgagcacgggacgtgcgacggcgtcggcgggtgcggatacgcggggcagcgtcagcgggttctcgacggtcacggcgggcatgtcgacgcggccgcataattatataataataaactgcatgccgccagatttttgtaatcaaatcgtgttgtgaaagttgtcttccctaatttatgcccattacattaaaacattgacaggggattttaattttaatttcagtatggtttcaattatggccaatatatataataaactataaccatatgtataagaatgtaaaaagctagttttatgtacataaaaatgggacaaacattttgatgttactgaataaatattaaaagtattaaccaagaaatatgaaagtaggataaaaaaacagtgaatgtttccagctgctaggaaaaacgataagtcttagatctataaagagaatcaaaaacgcggtcaaatgcatagcacataatatattcatatccccaataaataacccgaaatgtgtaaagccagaataaatgtaataataagattgaagaaaacaaaatagtgatgtaaaatagcagcaaggaaataaagtaacccctattcaataactattgctgacgtcttttactcgtacatgtcatcatttaattacgtaatttaagtttggtttatttaaagtttgatttccggttgtacaagggtgagcgtacttttaaaacccactgtatataaatactttggtaaagtgcaggttggggagtttcagaagcttgaaaagctccgtttcccgttataaagctattgctgaatatccgttatccagttggctggcagctttttaaggttgttcgtgcactggcttcactccccacagaacacagagcttttggatctgaaggtcagttgggactgggacccacatgccgagcttagtttgatagtcagcgcgctttaatgacgacaactgcacggcgcgcacaacccattaataatatattaattcaaaagagctataaaatattaaaaaatattcaaatataactaactaacgcgcagtgcacgattttctgacaacaattcagtttcgcttttcatgagactccattgcattttcctttgtgtttttcacacacgtggtgtttttctgttactcgcacttcgatagtggttattttttttggttacattgaaaaaatacaccgactgccagccgaattcccattcgaaccttaatttgaccaattgacggaaaattaattgcgcccaaaattaattagcaagcggatatacaatttttttacgtgaaaagagcgtgttatttgtcgaaaagattttacaattgattgtgtttaagtaaattaacctgcgatatctatgtgtatgtgctacgatccgaatttctgacattacggtaagtggcgtgtttttggcgggaataaagtcggtttctctttgtgccgtatttctctaccgttttttctggcgccaaaatgaatgaaaacggttggcaacatttcaaacttaacattgcaacattctaaccgctgttaagcgtttgctctgcaaattgttgtagctatgttggagttctggaacaccacctctccctgcgactttgttttgtttttcgctctcgacatatggaatcgaatctcttattccgggagcggttcattgacccagcaacaacaatattcgccagattttctcctgccagcgatttgcggaattcatccgctcaacagttagaagtaaatgccgtcgagcagcgggcaaaatcgatcgacgaaatcgagagccgcgttcagttgccttcaagccgtacttagaagaagtgctggtcccccagaaatcagagagatttttcccaacttgcatttttccaatactctgacaaagcccctcagaccgtcgcaatcacacagctatatactgatatatagatctctattgcgcagatcacaccttaaatgcctttcgtcgagagatttcaacaaatacgtaattttgttatgaacgtctgcctcgtcgaggccatccaattcgtccaggacctctcgcacgccatctgtctggacctccagggcctatttaatctcaagtagagatcaccgagcgatctcccagcggtaagttacgccattggtttttgggcacaaggaagtgaaagtgaagacacgggtgaaattacggttttcgggatctcgagagaaaggggaaagtacgaacctcatggcagcagcactccattttgagaggttatgtgaaagaacacacaagaaagtttggaattttcgacaggcggcgaaccaataataatgttgttatccataataatattaattagtgaatttttatttcaccttttcgcggcattattctcacaaatttataagacagattttcaaattaagacagaaagttttttaatgttagtgaaaagtacttattccagttgatagttaaatactatttaccgcaaaaaattaaaagagaactaaatttaaaggtaaaatcgtttttttttttggaaagtgcattgcttaaattatggtaccgactatcaaaataaaaataattaatttttatatggtgtttcaatattcactttaaattacctatgactcgctttctaaccactctcttcttattacgaacatcaattttcttgttacatcatttcggacctttcatttttcatcaccagctcatcccatcaattcagatacactttacttcattaagtagcagcaatcatctaacaaagctgaccaaacaacggaccggcttccagaatccttaactgagacggacgttttgcttggtttttaaaactaaacgactttttggtacccacacctgttgacctctgacgaatttctcgatccactgaccgatccactgatccagtgatcatcatcatcatccgaattccacagtttaaacatggactataaggaccacgacggagactacaaggatcatgatattgattacaaagacgatgacgataagatggccccaaagaagaagcggaaggtcggtatccacggagtcccagcagccgacaagaagtacagcatcggcctggacatcggcaccaactctgtgggctgggccgtgatcaccgacgagtacaaggtgcccagcaagaaattcaaggtgctgggcaacaccgaccggcacagcatcaagaagaacctgatcggagccctgctgttcgacagcggcgaaacagccgaggccacccggctgaagagaaccgccagaagaagatacaccagacggaagaaccggatctgctatctgcaagagatcttcagcaacgagatggccaaggtggacgacagcttcttccacagactggaagagtccttcctggtggaagaggataagaagcacgagcggcaccccatcttcggcaacatcgtggacgaggtggcctaccacgagaagtaccccaccatctaccacctgagaaagaaactggtggacagcaccgacaaggccgacctgcggctgatctatctggccctggcccacatgatcaagttccggggccacttcctgatcgagggcgacctgaaccccgacaacagcgacgtggacaagctgttcatccagctggtgcagacctacaaccagctgttcgaggaaaaccccatcaacgccagcggcgtggacgccaaggccatcctgtctgccagactgagcaagagcagacggctggaaaatctgatcgcccagctgcccggcgagaagaagaatggcctgttcggaaacctgattgccctgagcctgggcctgacccccaacttcaagagcaacttcgacctggccgaggatgccaaactgcagctgagcaaggacacctacgacgacgacctggacaacctgctggcccagatcggcgaccagtacgccgacctgtttctggccgccaagaacctgtccgacgccatcctgctgagcgacatcctgagagtgaacaccgagatcaccaaggcccccctgagcgcctctatgatcaagagatacgacgagcaccaccaggacctgaccctgctgaaagctctcgtgcggcagcagctgcctgagaagtacaaagagattttcttcgaccagagcaagaacggctacgccggctacattgacggcggagccagccaggaagagttctacaagttcatcaagcccatcctggaaaagatggacggcaccgaggaactgctcgtgaagctgaacagagaggacctgctgcggaagcagcggaccttcgacaacggcagcatcccccaccagatccacctgggagagctgcacgccattctgcggcggcaggaagatttttacccattcctgaaggacaaccgggaaaagatcgagaagatcctgaccttccgcatcccctactacgtgggccctctggccaggggaaacagcagattcgcctggatgaccagaaagagcgaggaaaccatcaccccctggaacttcgaggaagtggtggacaagggcgcttccgcccagagcttcatcgagcggatgaccaacttcgataagaacctgcccaacgagaaggtgctgcccaagcacagcctgctgtacgagtacttcaccgtgtataacgagctgaccaaagtgaaatacgtgaccgagggaatgagaaagcccgccttcctgagcggcgagcagaaaaaggccatcgtggacctgctgttcaagaccaaccggaaagtgaccgtgaagcagctgaaagaggactacttcaagaaaatcgagtgcttcgactccgtggaaatctccggcgtggaagatcggttcaacgcctccctgggcacataccacgatctgctgaaaattatcaaggacaaggacttcctggacaatgaggaaaacgaggacattctggaagatatcgtgctgaccctgacactgtttgaggacagagagatgatcgaggaacggctgaaaacctatgcccacctgttcgacgacaaagtgatgaagcagctgaagcggcggagatacaccggctggggcaggctgagccggaagctgatcaacggcatccgggacaagcagtccggcaagacaatcctggatttcctgaagtccgacggcttcgccaacagaaacttcatgcagctgatccacgacgacagcctgacctttaaagaggacatccagaaagcccaggtgtccggccagggcgatagcctgcacgagcacattgccaatctggccggcagccccgccattaagaagggcatcctgcagacagtgaaggtggtggacgagctcgtgaaagtgatgggccggcacaagcccgagaacatcgtgatcgaaatggccagagagaaccagaccacccagaagggacagaagaacagccgcgagagaatgaagcggatcgaagagggcatcaaagagctgggcagccagatcctgaaagaacaccccgtggaaaacacccagctgcagaacgagaagctgtacctgtactacctgcagaatgggcgggatatgtacgtggaccaggaactggacatcaaccggctgtccgactacgatgtggaccatatcgtgcctcagagctttctgaaggacgactccatcgacaacaaggtgctgaccagaagcgacaagaaccggggcaagagcgacaacgtgccctccgaagaggtcgtgaagaagatgaagaactactggcggcagctgctgaacgccaagctgattacccagagaaagttcgacaatctgaccaaggccgagagaggcggcctgagcgaactggataaggccggcttcatcaagagacagctggtggaaacccggcagatcacaaagcacgtggcacagatcctggactcccggatgaacactaagtacgacgagaatgacaagctgatccgggaagtgaaagtgatcaccctgaagtccaagctggtgtccgatttccggaaggatttccagttttacaaagtgcgcgagatcaacaactaccaccacgcccacgacgcctacctgaacgccgtcgtgggaaccgccctgatcaaaaagtaccctaagctggaaagcgagttcgtgtacggcgactacaaggtgtacgacgtgcggaagatgatcgccaagagcgagcaggaaatcggcaaggctaccgccaagtacttcttctacagcaacatcatgaactttttcaagaccgagattaccctggccaacggcgagatccggaagcggcctctgatcgagacaaacggcgaaaccggggagatcgtgtgggataagggccgggattttgccaccgtgcggaaagtgctgagcatgccccaagtgaatatcgtgaaaaagaccgaggtgcagacaggcggcttcagcaaagagtctatcctgcccaagaggaacagcgataagctgatcgccagaaagaaggactgggaccctaagaagtacggcggcttcgacagccccaccgtggcctattctgtgctggtggtggccaaagtggaaaagggcaagtccaagaaactgaagagtgtgaaagagctgctggggatcaccatcatggaaagaagcagcttcgagaagaatcccatcgactttctggaagccaagggctacaaagaagtgaaaaaggacctgatcatcaagctgcctaagtactccctgttcgagctggaaaacggccggaagagaatgctggcctctgccggcgaactgcagaagggaaacgaactggccctgccctccaaatatgtgaacttcctgtacctggccagccactatgagaagctgaagggctcccccgaggataatgagcagaaacagctgtttgtggaacagcacaagcactacctggacgagatcatcgagcagatcagcgagttctccaagagagtgatcctggccgacgctaatctggacaaagtgctgtccgcctacaacaagcaccgggataagcccatcagagagcaggccgagaatatcatccacctgtttaccctgaccaatctgggagcccctgccgccttcaagtactttgacaccaccatcgaccggaagaggtacaccagcaccaaagaggtgctggacgccaccctgatccaccagagcatcaccggcctgtacgagacacggatcgacctgtctcagctgggaggcgacaaaaggccggcggccacgaaaaaggccggccaggcaaaaaagaaaaaggagggcagaggaagtcttctaacatgcggtgacgtggaggagaatcccggccctatggtgagcaagggcgaggagctgttcaccggggtggtgcccatcctggtcgagctggacggcgacgtaaacggccacaagttcagcgtgtccggcgagggcgagggcgatgccacctacggcaagctgaccctgaagttcatctgcaccaccagcaagctgcccgtgccctggcccaccctcgtgaccaccctgacctacggcgtgcagtgcttcagccgctaccccgaccacatgaagcagcacgacttcttcaagtccgccatgcccgaaggctacgtccaggagcgcaccatcttcttcaaggacgacggcaactacaagacccgcgccgaggtgaagttcgagggcgacaccctggtgaaccgcatcgagctgaagggcatcgacttcaaggaggacggcaacatcctggggcacaagctggagtacaactacaacagccacaacgtctatatcatggccgacaagcagaagaacggcatcaaggtgaacttcaagatccgccacaacatcgaggacggcagcgtgcagctcgccgaccactaccagcagaacacccccatcggcgacggccccgtgctgctgcccgacaaccactacctgagcacccagtccgccctgagcaaagaccccaacgagaagcgcgatcacatggtcctgctggagttcgtgaccgccgccgggatcactctcggcatggacgagctgtacaagtaattaattaactagaatgaatcgtttttaaaataacaaatcaattgttttataatattcgtacgattctttgattatgtaataaaatgtgatcattaggaagattacgaaaaatataaaaaatatgagttctgtgtgtataacaaatgctgtaaacgccacaattgtgtttgttgcaaataaacccatgattatttgattaaaattgttgttttctttgttcatagacaatagtgtgttttgcctaaacgtgtactgcataaactccatgcgagtgtatagcgagctagtggctaacgcttgccccaccaaagtagattcgtcaaaatcctcaatttcatcaccctcctccaagtttaacatttggccgtcggaattaacttctaaagatgccacataatctaataaatgaaatagagattcaaacgtggcgtcatcgtccgtttcgaccatttccgaaaagaactcgggcataaactctatgatttctctggacgtggtgttgtcgaaactctcaaagtacgcagtcaggaacgtgcgcgacatgtcgtcgggaaactcgcgcggaaacatgttgttgtaaccgaacgggtcccatagcgccaaaaccaaatctgccagcgtcaatagaatgagcacgatgccgacaatggagctggcttggatagcgattcgagttaacggccggggcgcgcccatactcggtggcctccccaccaccaacttttttgcactgcaaaaaaacacgcttttgcacgcgggcccatacatagtacaaactctacgtttcgtagactattttacataaatagtctacaccgttgtatacgctccaaatacactaccacacattgaacctttttgcagtgcaaaaaagtacgtgtcggcagtcacgtaggccggccttatcgggtcgcgtcctgtcacgtacgaatcacattatcggaccggacgagtgttgtcttatcgtgacaggacgccagcttcctgtgttgctaaccgcagccggacgcaactccttatcggaacaggacgcgcctccatatcagccgcgcgttatctcatgcgcgtgaccggacacgaggcgcccgtcccgcttatcgcgcctataaatacagcccgcaacgatctggtaaacacagttgaacagcatctgttacagcgacacaacatgagccggtccaacaacgccaacgcgcccacgccatccaaccgccgccgcaacctgtctctggtgatggtgcgctcctccaagaacgtcatcaaggagttcatgcgcttcaaggtgcgcatggagggcaccgtgaacggccacgagttcgagatcgagggcgagggcgagggccgcccctacgagggccacaacaccgtgaagctgaaggtgaccaagggcggccccctgcccttcgcctgggacatcctgtccccccagttccagtacggctccaaggtgtacgtgaagcaccccgccgacatccccgactacaagaagctgtccttccccgagggcttcaagtgggagcgcgtgatgaacttcgaggacggcggcgtggtgaccgtgacccaggactcctccctgcaggacggctgcttcatctacaaggtgaagttcatcggcgtgaacttcccctccgacggccccgtaatgcagaagaagaccatgggctgggaggcctccaccgagcgcctgtacccccgcgacggcgtgctgaagggcgagatccacaaggccctgaagctgaaggacggcggccactacctggtggagttcaagtccatctacatggccaagaagcccgtgcagctgcccggctactactacgtggactccaagctggacatcacctcccacaacgaggactacaccatcgtggagcagtacgagcgcaccgagggccgccaccacctgttcctgtaggactctagatcataatcagccataccacatttgtagaggttttacttgctttaaaaaacctcccacacctccccctgaacctgaaacataaaatgaatgcaattgttgttgttaacttgtttattgcagcttataatggttacaaataaagcaatagcatcacaaatttcacaaataaagcatttttttcactgcattctagttgtggtttgtccaaactcatcaatgtatcttaaagcttctaggccggccgatctcggatctgacaatgttcagtgcagagactcggctacgcctcgtggactttgaagttgaccaacaatgtttattcttacctctaatagtcctctgtggcaaggtcaagattctgttagaagccaatgaagaacctggttgttcaataacattttgttcgtctaatatttcactaccgcttgacgttggctgcacttcatgtacctcatctataaacgcttcttctgtatcgctctggacgtcatcttcacttacgtgatctgatatttcactgtcagaatcctcaccaacaagctcgtcatcgctttgcagaagagcagagaggatatgctcatcgtctaaagaactacccattttattatatattagtcacgatatctataacaagaaaatatatatataataagttatcacgtaagtagaacatgaaataacaatataattatcgtatgagttaaatcttaaaagtcacgtaaaagataatcatgcgtcattttgactcacgcggtcgttatagttcaaaatcagtgacacttaccgcattgacaagcacgcctcacgggagctccaagcggcgactgagatgtcctaaatgcacagcgacggattcgcgctatttagaaagagagagcaatatttcaagaatgcatgcgtcaattttacgcagactatctttctagggttaaaaaagatttgcgctttactcgacctaaactttaaacacgtcatagaatcttcgtttgacaaaaaccacattgtggccaagctgtgtgacgcgacgcgcgctaaagaatggcaaaccaagtcgcgcgagcgtcgactctagaggatccccgggtaccgagctcgaattcgtaatcatggtcatagctgtttcctgtgtgaaattgttatccgctcacaattccacacaacatacgagccggaagcataaagtgtaaagcctggggtgcctaatgagtgagctaactcacattaattgcgttgcgctcactgcccgctttccagtcgggaaacctgtcgtgccagctgcattaatgaatcggccaacgcgcggggagaggcggtttgcgtattgggcgctcttccgcttcctcgctcactgactcgctgcgctcggtcgttcggctgcggcgagcggtatcagctcactcaaaggcggtaatacggt

SEQ ID NO: 5 - DNA, 14625 bp, Artificial Sequence
  pBac-dmeUbiq-Cas9-2a-eGFP-p10-UTR-Opie2-dsRed
tatccacagaatcaggggataacgcaggaaagaacatgtgagcaaaaggccagcaaaaggccaggaaccgtaaaaaggccgcgttgctggcgtttttccataggctccgcccccctgacgagcatcacaaaaatcgacgctcaagtcagaggtggcgaaacccgacaggactataaagataccaggcgtttccccctggaagctccctcgtgcgctctcctgttccgaccctgccgcttaccggatacctgtccgcctttctcccttcgggaagcgtggcgctttctcaatgctcacgctgtaggtatctcagttcggtgtaggtcgttcgctccaagctgggctgtgtgcacgaaccccccgttcagcccgaccgctgcgccttatccggtaactatcgtcttgagtccaacccggtaagacacgacttatcgccactggcagcagccactggtaacaggattagcagagcgaggtatgtaggcggtgctacagagttcttgaagtggtggcctaactacggctacactagaaggacagtatttggtatctgcgctctgctgaagccagttaccttcggaaaaagagttggtagctcttgatccggcaaacaaaccaccgctggtagcggtggtttttttgtttgcaagcagcagattacgcgcagaaaaaaaggatctcaagaagatcctttgatcttttctacggggtctgacgctcagtggaacgaaaactcacgttaagggattttggtcatgagattatcaaaaaggatcttcacctagatccttttaaattaaaaatgaagttttaaatcaatctaaagtatatatgagtaaacttggtctgacagttaccaatgcttaatcagtgaggcacctatctcagcgatctgtctatttcgttcatccatagttgcctgactccccgtcgtgtagataactacgatacgggagggcttaccatctggccccagtgctgcaatgataccgcgagacccacgctcaccggctccagatttatcagcaataaaccagccagccggaagggccgagcgcagaagtggtcctgcaactttatccgcctccatccagtctattaattgttgccgggaagctagagtaagtagttcgccagttaatagtttgcgcaacgttgttgccattgctacaggcatcgtggtgtcacgctcgtcgtttggtatggcttcattcagctccggttcccaacgatcaaggcgagttacatgatcccccatgttgtgcaaaaaagcggttagctccttcggtcctccgatcgttgtcagaagtaagttggccgcagtgttatcactcatggttatggcagcactgcataattctcttactgtcatgccatccgtaagatgcttttctgtgactggtgagtactcaaccaagtcattctgagaatagtgtatgcggcgaccgagttgctcttgcccggcgtcaatacgggataataccgcgccacatagcagaactttaaaagtgctcatcattggaaaacgttcttcggggcgaaaactctcaaggatcttaccgctgttgagatccagttcgatgtaacccactcgtgcacccaactgatcttcagcatcttttactttcaccagcgtttctgggtgagcaaaaacaggaaggcaaaatgccgcaaaaaagggaataagggcgacacggaaatgttgaatactcatactcttcctttttcaatattattgaagcatttatcagggttattgtctcatgagcggatacatatttgaatgtatttagaaaaataaacaaataggggttccgcgcacatttccccgaaaagtgccacctgacgtctaagaaaccattattatcatgacattaacctataaaaataggcgtatcacgaggccctttcgtctcgcgcgtttcggtgatgacggtgaaaacctctgacacatgcagctcccggagacggtcacagcttgtctgtaagcggatgccgggagcagacaagcccgtcagggcgcgtcagcgggtgttggcgggtgtcggggctggcttaactatgcggcatcagagcagattgtactgagagtgcaccatatgcggtgtgaaataccgcacagatgcgtaaggagaaaataccgcatcaggcgccattcgccattcaggctgcgcaactgttgggaagggcgatcggtgcgggcctcttcgctattacgccagctggcgaaagggggatgtgctgcaaggcgattaagttgggtaacgccagggttttcccagtcacgacgttgtaaaacgacggccagtgccaagctttgtttaaaatataacaaaattgtgatcccacaaaatgaagtggggcaaaatcaaataattaactagtgtccgtaaacttgttggtcttcaactttttgaggaacacgttggacggcaaatcgtgactataacacaagttgatttaataattttagccaacacgtcgggctgcgtgttttttgcgctctgtgtacacgttgattaactggtcgattaaataatttaatttttggttcttctttaaatctgtgatgaaattttttaaaataactttaaattcttcattggtaaaaaatgccacgttttgcaacttgtgagggtctaatatgaggtcaaactcagtaggagttttatccaaaaaagaaaacatgattacgtctgtacacgaacgcgtattaacgcagagtgcaaagtataagagggttaaaaaatatattttacgcaccatatacgcatcgggttgatatcgttaatatggatcaatttgaacagttgattaacgtgtctctgctcaagtctttgatcaaaacgcaaatcgacgaaaatgtgtcggacaatatcaagtcgatgagcgaaaaactaaaaaggctagaatacgacaatctcacagacagcgttgagatatacggtattcacgacagcaggctgaataataaaaaaattagaaactattatttaaccctagaaagataatcatattgtgacgtacgttaaagataatcatgcgtaaaattgacgcatgtgttttatcggtctgtatatcgaggtttatttattaatttgaatagatattaagttttattatatttacacttacatactaataataaattcaacaaacaatttatttatgtttatttatttattaaaaaaaaacaaaaactcaaaatttcttctataaagtaacaaaacttttaaacattctctcttttacaaaaataaacttattttgtactttaaaaacagtcatgttgtattataaaataagtaattagcttaacttatacataatagaaacaaattatacttattagtcagtcagaaacaactttggcacatatcaatattatgctctcgacaaataacttttttgcattttttgcacgatgcatttgcctttcgccttattttagaggggcagtaagtacagtaagtacgttttttcattactggctcttcagtactgtcatctgatgtaccaggcacttcatttggcaaaatattagagatattatcgcgcaaatatctcttcaaagtaggagcttctaaacgcttacgcataaacgatgacgtcaggctcatgtaaaggtttctcataaattttttgcgactttgaaccttttctcccttgctactgacattatggctgtatataataaaagaatttatgcaggcaatgtttatcattccgtacaataatgccataggccacctattcgtcttcctactgcaggtcatcacagaacacatttggtctagcgtgtccactccgcctttagtttgattataatacataaccatttgcggtttaccggtactttcgttgatagaagcatcctcatcacaagatgataataagtataccatcttagctggcttcggtttatatgagacgagagtaaggggtccgtcaaaacaaaacatcgatgttcccactggcctggagcgactgtttttcagtacttccggtatctcgcgtttgtttgatcgcacggttcccacaatggttaattcgagctcgcccggggtcctaggtcgacgatgtaggtcacggtctcgaagccgcggtgcgggtgccagggcgtgcccttgggctccccgggcgcgtactccacctcacccatctggtccatcatgatgaacgggtcgaggtggcggtagttgatcccggcgaacgcgcggcgcaccgggaagccctcgccctcgaaaccgctgggcgcggtggtcacggtgagcacgggacgtgcgacggcgtcggcgggtgcggatacgcggggcagcgtcagcgggttctcgacggtcacggcgggcatgtcgacgcggccgccgcgcagatcgccgatgggcgtggcgccggagggcaccttcaccttgccgtacggcttgctgttcttcgcgttcaaaatctccagctccattttgctttcggtgcgcttgcaatcagtactgtccaaaatcgaaaatcgccgaaccgtagtgtgaccgtgcggggctctgcgaaaataaacttttttaggtatatggccacacacggggaaagcacagtggattatatgttttaatattataatatgcaggttttcattacttatccagatgtaagcccacttaaagcgatttaacaattatttgccgaaagagtataaacaaatttcacttaaaaatggattaagaaaagcttgtgtaagattatgcgcagcgttgccagatagctccatttaaaacacttcaaaaacaataagttttgaaaatatatacataaatagcagtcgttgccgcaacgctcaacacatcacacttttaaaacaccctttacctacacagaattactttttaaatttccagtcaagctgcgagtttcaaaattatagccggtagagaagacagtgctatttcaaaagcaaactaacaagggtcttaaattccaaaacaccaatcctaacaagccttggacttttgtaagtttagatcaaaggtggcattgcattcaatgtcatggtaagaagtaggtcgtctaggtagaaatcctcattcagccggtcaagtcagtacgagaaaggtctcaatttgaaattgtcttaaaaatattttattgttttgtactgtggtgagtttaaacgaaaaacacaaaaaaaaagtgatacacagaaatcataaaaaattttaatacaaggtattcgtacgtatcaaaaacatttcggcacaattttttttctctgtactaaagtgttacgaacactacggtattttttagtgattttcaacggacaccgaaggtatataaacagcgttcgcgaacggtcgccttcaaaaccaattgacatttgcagcagcaagtacaagcagaaagtaaagcgcaatcagcgaaaaatttatacttaattgttggtgattaaagtacaattaaaagaacattctcgaaagtcacaagaaacgtaagtttttaactcgctgttaccaattagtaataagagcaacaagacgttgagtaatttcaagaaaaactgcatttcaaggtctttgttcggccattttttttttattcaacgctctacgtaattacaaaataagaaattggcagccacgcatcttgttttcccaatcaattggcatcaaaacgcaaacaaatctataaataaaacttgcgtgttgattttcgccaagatttattggcaaattgtgaaattcgcagtgacgcatttgaaaattcgagaaatcacgaacgcactcgagcatttgtgtgcatgttattagttagttagttctttgcttaattgaagtattttaccaacgaaatccacttatttttagctgaaatagagtaggttgcttgaaacgaaagccacgtctggaaaatttcttattgcttagtagttgtgacgtcaccatatacacacaaaataatgtgtatgcatgcgtttcagctgtgtatatatacatgcacacactcgcattatgaaaacgatgacgagcaacggaacaggtttctcaactacctttgttcctgtttcttcgctttcctttgttccaatattcgtagagggttaataggggtttctcaacaaagttggcgtcgataaataagtttcccatttttattccccagccaggaagttagtttcaatagttttgtaatttcaacgaaactcatttgatttcgtactaattttccacatctctattttgacccgcagaatttaaatatggactataaggaccacgacggagactacaaggatcatgatattgattacaaagacgatgacgataagatggccccaaagaagaagcggaaggtcggtatccacggagtcccagcagccgacaagaagtacagcatcggcctggacatcggcaccaactctgtgggctgggccgtgatcaccgacgagtacaaggtgcccagcaagaaattcaaggtgctgggcaacaccgaccggcacagcatcaagaagaacctgatcggagccctgctgttcgacagcggcgaaacagccgaggccacccggctgaagagaaccgccagaagaagatacaccagacggaagaaccggatctgctatctgcaagagatcttcagcaacgagatggccaaggtggacgacagcttcttccacagactggaagagtccttcctggtggaagaggataagaagcacgagcggcaccccatcttcggcaacatcgtggacgaggtggcctaccacgagaagtaccccaccatctaccacctgagaaagaaactggtggacagcaccgacaaggccgacctgcggctgatctatctggccctggcccacatgatcaagttccggggccacttcctgatcgagggcgacctgaaccccgacaacagcgacgtggacaagctgttcatccagctggtgcagacctacaaccagctgttcgaggaaaaccccatcaacgccagcggcgtggacgccaaggccatcctgtctgccagactgagcaagagcagacggctggaaaatctgatcgcccagctgcccggcgagaagaagaatggcctgttcggaaacctgattgccctgagcctgggcctgacccccaacttcaagagcaacttcgacctggccgaggatgccaaactgcagctgagcaaggacacctacgacgacgacctggacaacctgctggcccagatcggcgaccagtacgccgacctgtttctggccgccaagaacctgtccgacgccatcctgctgagcgacatcctgagagtgaacaccgagatcaccaaggcccccctgagcgcctctatgatcaagagatacgacgagcaccaccaggacctgaccctgctgaaagctctcgtgcggcagcagctgcctgagaagtacaaagagattttcttcgaccagagcaagaacggctacgccggctacattgacggcggagccagccaggaagagttctacaagttcatcaagcccatcctggaaaagatggacggcaccgaggaactgctcgtgaagctgaacagagaggacctgctgcggaagcagcggaccttcgacaacggcagcatcccccaccagatccacctgggagagctgcacgccattctgcggcggcaggaagatttttacccattcctgaaggacaaccgggaaaagatcgagaagatcctgaccttccgcatcccctactacgtgggccctctggccaggggaaacagcagattcgcctggatgaccagaaagagcgaggaaaccatcaccccctggaacttcgaggaagtggtggacaagggcgcttccgcccagagcttcatcgagcggatgaccaacttcgataagaacctgcccaacgagaaggtgctgcccaagcacagcctgctgtacgagtacttcaccgtgtataacgagctgaccaaagtgaaatacgtgaccgagggaatgagaaagcccgccttcctgagcggcgagcagaaaaaggccatcgtggacctgctgttcaagaccaaccggaaagtgaccgtgaagcagctgaaagaggactacttcaagaaaatcgagtgcttcgactccgtggaaatctccggcgtggaagatcggttcaacgcctccctgggcacataccacgatctgctgaaaattatcaaggacaaggacttcctggacaatgaggaaaacgaggacattctggaagatatcgtgctgaccctgacactgtttgaggacagagagatgatcgaggaacggctgaaaacctatgcccacctgttcgacgacaaagtgatgaagcagctgaagcggcggagatacaccggctggggcaggctgagccggaagctgatcaacggcatccgggacaagcagtccggcaagacaatcctggatttcctgaagtccgacggcttcgccaacagaaacttcatgcagctgatccacgacgacagcctgacctttaaagaggacatccagaaagcccaggtgtccggccagggcgatagcctgcacgagcacattgccaatctggccggcagccccgccattaagaagggcatcctgcagacagtgaaggtggtggacgagctcgtgaaagtgatgggccggcacaagcccgagaacatcgtgatcgaaatggccagagagaaccagaccacccagaagggacagaagaacagccgcgagagaatgaagcggatcgaagagggcatcaaagagctgggcagccagatcctgaaagaacaccccgtggaaaacacccagctgcagaacgagaagctgtacctgtactacctgcagaatgggcgggatatgtacgtggaccaggaactggacatcaaccggctgtccgactacgatgtggaccatatcgtgcctcagagctttctgaaggacgactccatcgacaacaaggtgctgaccagaagcgacaagaaccggggcaagagcgacaacgtgccctccgaagaggtcgtgaagaagatgaagaactactggcggcagctgctgaacgccaagctgattacccagagaaagttcgacaatctgaccaaggccgagagaggcggcctgagcgaactggataaggccggcttcatcaagagacagctggtggaaacccggcagatcacaaagcacgtggcacagatcctggactcccggatgaacactaagtacgacgagaatgacaagctgatccgggaagtgaaagtgatcaccctgaagtccaagctggtgtccgatttccggaaggatttccagttttacaaagtgcgcgagatcaacaactaccaccacgcccacgacgcctacctgaacgccgtcgtgggaaccgccctgatcaaaaagtaccctaagctggaaagcgagttcgtgtacggcgactacaaggtgtacgacgtgcggaagatgatcgccaagagcgagcaggaaatcggcaaggctaccgccaagtacttcttctacagcaacatcatgaactttttcaagaccgagattaccctggccaacggcgagatccggaagcggcctctgatcgagacaaacggcgaaaccggggagatcgtgtgggataagggccgggattttgccaccgtgcggaaagtgctgagcatgccccaagtgaatatcgtgaaaaagaccgaggtgcagacaggcggcttcagcaaagagtctatcctgcccaagaggaacagcgataagctgatcgccagaaagaaggactgggaccctaagaagtacggcggcttcgacagccccaccgtggcctattctgtgctggtggtggccaaagtggaaaagggcaagtccaagaaactgaagagtgtgaaagagctgctggggatcaccatcatggaaagaagcagcttcgagaagaatcccatcgactttctggaagccaagggctacaaagaagtgaaaaaggacctgatcatcaagctgcctaagtactccctgttcgagctggaaaacggccggaagagaatgctggcctctgccggcgaactgcagaagggaaacgaactggccctgccctccaaatatgtgaacttcctgtacctggccagccactatgagaagctgaagggctcccccgaggataatgagcagaaacagctgtttgtggaacagcacaagcactacctggacgagatcatcgagcagatcagcgagttctccaagagagtgatcctggccgacgctaatctggacaaagtgctgtccgcctacaacaagcaccgggataagcccatcagagagcaggccgagaatatcatccacctgtttaccctgaccaatctgggagcccctgccgccttcaagtactttgacaccaccatcgaccggaagaggtacaccagcaccaaagaggtgctggacgccaccctgatccaccagagcatcaccggcctgtacgagacacggatcgacctgtctcagctgggaggcgacaaaaggccggcggccacgaaaaaggccggccaggcaaaaaagaaaaaggagggcagaggaagtcttctaacatgcggtgacgtggaggagaatcccggccctatggtgagcaagggcgaggagctgttcaccggggtggtgcccatcctggtcgagctggacggcgacgtaaacggccacaagttcagcgtgtccggcgagggcgagggcgatgccacctacggcaagctgaccctgaagttcatctgcaccaccagcaagctgcccgtgccctggcccaccctcgtgaccaccctgacctacggcgtgcagtgcttcagccgctaccccgaccacatgaagcagcacgacttcttcaagtccgccatgcccgaaggctacgtccaggagcgcaccatcttcttcaaggacgacggcaactacaagacccgcgccgaggtgaagttcgagggcgacaccctggtgaaccgcatcgagctgaagggcatcgacttcaaggaggacggcaacatcctggggcacaagctggagtacaactacaacagccacaacgtctatatcatggccgacaagcagaagaacggcatcaaggtgaacttcaagatccgccacaacatcgaggacggcagcgtgcagctcgccgaccactaccagcagaacacccccatcggcgacggccccgtgctgctgcccgacaaccactacctgagcacccagtccgccctgagcaaagaccccaacgagaagcgcgatcacatggtcctgctggagttcgtgaccgccgccgggatcactctcggcatggacgagctgtacaagtaattaattaactagaatgaatcgtttttaaaataacaaatcaattgttttataatattcgtacgattctttgattatgtaataaaatgtgatcattaggaagattacgaaaaatataaaaaatatgagttctgtgtgtataacaaatgctgtaaacgccacaattgtgtttgttgcaaataaacccatgattatttgattaaaattgttgttttctttgttcatagacaatagtgtgttttgcctaaacgtgtactgcataaactccatgcgagtgtatagcgagctagtggctaacgcttgccccaccaaagtagattcgtcaaaatcctcaatttcatcaccctcctccaagtttaacatttggccgtcggaattaacttctaaagatgccacataatctaataaatgaaatagagattcaaacgtggcgtcatcgtccgtttcgaccatttccgaaaagaactcgggcataaactctatgatttctctggacgtggtgttgtcgaaactctcaaagtacgcagtcaggaacgtgcgcgacatgtcgtcgggaaactcgcgcggaaacatgttgttgtaaccgaacgggtcccatagcgccaaaaccaaatctgccagcgtcaatagaatgagcacgatgccgacaatggagctggcttggatagcgattcgagttaacggccggggcgcgcccatactcggtggcctccccaccaccaacttttttgcactgcaaaaaaacacgcttttgcacgcgggcccatacatagtacaaactctacgtttcgtagactattttacataaatagtctacaccgttgtatacgctccaaatacactaccacacattgaacctttttgcagtgcaaaaaagtacgtgtcggcagtcacgtaggccggccttatcgggtcgcgtcctgtcacgtacgaatcacattatcggaccggacgagtgttgtcttatcgtgacaggacgccagcttcctgtgttgctaaccgcagccggacgcaactccttatcggaacaggacgcgcctccatatcagccgcgcgttatctcatgcgcgtgaccggacacgaggcgcccgtcccgcttatcgcgcctataaatacagcccgcaacgatctggtaaacacagttgaacagcatctgttacagcgacacaacatgagccggtccaacaacgccaacgcgcccacgccatccaaccgccgccgcaacctgtctctggtgatggtgcgctcctccaagaacgtcatcaaggagttcatgcgcttcaaggtgcgcatggagggcaccgtgaacggccacgagttcgagatcgagggcgagggcgagggccgcccctacgagggccacaacaccgtgaagctgaaggtgaccaagggcggccccctgcccttcgcctgggacatcctgtccccccagttccagtacggctccaaggtgtacgtgaagcaccccgccgacatccccgactacaagaagctgtccttccccgagggcttcaagtgggagcgcgtgatgaacttcgaggacggcggcgtggtgaccgtgacccaggactcctccctgcaggacggctgcttcatctacaaggtgaagttcatcggcgtgaacttcccctccgacggccccgtaatgcagaagaagaccatgggctgggaggcctccaccgagcgcctgtacccccgcgacggcgtgctgaagggcgagatccacaaggccctgaagctgaaggacggcggccactacctggtggagttcaagtccatctacatggccaagaagcccgtgcagctgcccggctactactacgtggactccaagctggacatcacctcccacaacgaggactacaccatcgtggagcagtacgagcgcaccgagggccgccaccacctgttcctgtaggactctagatcataatcagccataccacatttgtagaggttttacttgctttaaaaaacctcccacacctccccctgaacctgaaacataaaatgaatgcaattgttgttgttaacttgtttattgcagcttataatggttacaaataaagcaatagcatcacaaatttcacaaataaagcatttttttcactgcattctagttgtggtttgtccaaactcatcaatgtatcttaaagcttctaggccggccgatctcggatctgacaatgttcagtgcagagactcggctacgcctcgtggactttgaagttgaccaacaatgtttattcttacctctaatagtcctctgtggcaaggtcaagattctgttagaagccaatgaagaacctggttgttcaataacattttgttcgtctaatatttcactaccgcttgacgttggctgcacttcatgtacctcatctataaacgcttcttctgtatcgctctggacgtcatcttcacttacgtgatctgatatttcactgtcagaatcctcaccaacaagctcgtcatcgctttgcagaagagcagagaggatatgctcatcgtctaaagaactacccattttattatatattagtcacgatatctataacaagaaaatatatatataataagttatcacgtaagtagaacatgaaataacaatataattatcgtatgagttaaatcttaaaagtcacgtaaaagataatcatgcgtcattttgactcacgcggtcgttatagttcaaaatcagtgacacttaccgcattgacaagcacgcctcacgggagctccaagcggcgactgagatgtcctaaatgcacagcgacggattcgcgctatttagaaagagagagcaatatttcaagaatgcatgcgtcaattttacgcagactatctttctagggttaaaaaagatttgcgctttactcgacctaaactttaaacacgtcatagaatcttcgtttgacaaaaaccacattgtggccaagctgtgtgacgcgacgcgcgctaaagaatggcaaaccaagtcgcgcgagcgtcgactctagaggatccccgggtaccgagctcgaattcgtaatcatggtcatagctgtttcctgtgtgaaattgttatccgctcacaattccacacaacatacgagccggaagcataaagtgtaaagcctggggtgcctaatgagtgagctaactcacattaattgcgttgcgctcactgcccgctttccagtcgggaaacctgtcgtgccagctgcattaatgaatcggccaacgcgcggggagaggcggtttgcgtattgggcgctcttccgcttcctcgctcactgactcgctgcgctcggtcgttcggctgcggcgagcggtatcagctcactcaaaggcggtaatacggt

SEQ ID NO: 6 - DNA, 13680 bp, Artificial Sequence
  pBac-dmeNanos-Cas9-2a-eGFP-p10-UTR-Opie2-dsRed-Modified
tatccacagaatcaggggataacgcaggaaagaacatgtgagcaaaaggccagcaaaaggccaggaaccgtaaaaaggccgcgttgctggcgtttttccataggctccgcccccctgacgagcatcacaaaaatcgacgctcaagtcagaggtggcgaaacccgacaggactataaagataccaggcgtttccccctggaagctccctcgtgcgctctcctgttccgaccctgccgcttaccggatacctgtccgcctttctcccttcgggaagcgtggcgctttctcaatgctcacgctgtaggtatctcagttcggtgtaggtcgttcgctccaagctgggctgtgtgcacgaaccccccgttcagcccgaccgctgcgccttatccggtaactatcgtcttgagtccaacccggtaagacacgacttatcgccactggcagcagccactggtaacaggattagcagagcgaggtatgtaggcggtgctacagagttcttgaagtggtggcctaactacggctacactagaaggacagtatttggtatctgcgctctgctgaagccagttaccttcggaaaaagagttggtagctcttgatccggcaaacaaaccaccgctggtagcggtggtttttttgtttgcaagcagcagattacgcgcagaaaaaaaggatctcaagaagatcctttgatcttttctacggggtctgacgctcagtggaacgaaaactcacgttaagggattttggtcatgagattatcaaaaaggatcttcacctagatccttttaaattaaaaatgaagttttaaatcaatctaaagtatatatgagtaaacttggtctgacagttaccaatgcttaatcagtgaggcacctatctcagcgatctgtctatttcgttcatccatagttgcctgactccccgtcgtgtagataactacgatacgggagggcttaccatctggccccagtgctgcaatgataccgcgagacccacgctcaccggctccagatttatcagcaataaaccagccagccggaagggccgagcgcagaagtggtcctgcaactttatccgcctccatccagtctattaattgttgccgggaagctagagtaagtagttcgccagttaatagtttgcgcaacgttgttgccattgctacaggcatcgtggtgtcacgctcgtcgtttggtatggcttcattcagctccggttcccaacgatcaaggcgagttacatgatcccccatgttgtgcaaaaaagcggttagctccttcggtcctccgatcgttgtcagaagtaagttggccgcagtgttatcactcatggttatggcagcactgcataattctcttactgtcatgccatccgtaagatgcttttctgtgactggtgagtactcaaccaagtcattctgagaatagtgtatgcggcgaccgagttgctcttgcccggcgtcaatacgggataataccgcgccacatagcagaactttaaaagtgctcatcattggaaaacgttcttcggggcgaaaactctcaaggatcttaccgctgttgagatccagttcgatgtaacccactcgtgcacccaactgatcttcagcatcttttactttcaccagcgtttctgggtgagcaaaaacaggaaggcaaaatgccgcaaaaaagggaataagggcgacacggaaatgttgaatactcatactcttcctttttcaatattattgaagcatttatcagggttattgtctcatgagcggatacatatttgaatgtatttagaaaaataaacaaataggggttccgcgcacatttccccgaaaagtgccacctgacgtctaagaaaccattattatcatgacattaacctataaaaataggcgtatcacgaggccctttcgtctcgcgcgtttcggtgatgacggtgaaaacctctgacacatgcagctcccggagacggtcacagcttgtctgtaagcggatgccgggagcagacaagcccgtcagggcgcgtcagcgggtgttggcgggtgtcggggctggcttaactatgcggcatcagagcagattgtactgagagtgcaccatatgcggtgtgaaataccgcacagatgcgtaaggagaaaataccgcatcaggcgccattcgccattcaggctgcgcaactgttgggaagggcgatcggtgcgggcctcttcgctattacgccagctggcgaaagggggatgtgctgcaaggcgattaagttgggtaacgccagggttttcccagtcacgacgttgtaaaacgacggccagtgccaagctttgtttaaaatataacaaaattgtgatcccacaaaatgaagtggggcaaaatcaaataattaactagtgtccgtaaacttgttggtcttcaactttttgaggaacacgttggacggcaaatcgtgactataacacaagttgatttaataattttagccaacacgtcgggctgcgtgttttttgcgctctgtgtacacgttgattaactggtcgattaaataatttaatttttggttcttctttaaatctgtgatgaaattttttaaaataactttaaattcttcattggtaaaaaatgccacgttttgcaacttgtgagggtctaatatgaggtcaaactcagtaggagttttatccaaaaaagaaaacatgattacgtctgtacacgaacgcgtattaacgcagagtgcaaagtataagagggttaaaaaatatattttacgcaccatatacgcatcgggttgatatcgttaatatggatcaatttgaacagttgattaacgtgtctctgctcaagtctttgatcaaaacgcaaatcgacgaaaatgtgtcggacaatatcaagtcgatgagcgaaaaactaaaaaggctagaatacgacaatctcacagacagcgttgagatatacggtattcacgacagcaggctgaataataaaaaaattagaaactattatttaaccctagaaagataatcatattgtgacgtacgttaaagataatcatgcgtaaaattgacgcatgtgttttatcggtctgtatatcgaggtttatttattaatttgaatagatattaagttttattatatttacacttacatactaataataaattcaacaaacaatttatttatgtttatttatttattaaaaaaaaacaaaaactcaaaatttcttctataaagtaacaaaacttttaaacattctctcttttacaaaaataaacttattttgtactttaaaaacagtcatgttgtattataaaataagtaattagcttaacttatacataatagaaacaaattatacttattagtcagtcagaaacaactttggcacatatcaatattatgctctcgacaaataacttttttgcattttttgcacgatgcatttgcctttcgccttattttagaggggcagtaagtacagtaagtacgttttttcattactggctcttcagtactgtcatctgatgtaccaggcacttcatttggcaaaatattagagatattatcgcgcaaatatctcttcaaagtaggagcttctaaacgcttacgcataaacgatgacgtcaggctcatgtaaaggtttctcataaattttttgcgactttgaaccttttctcccttgctactgacattatggctgtatataataaaagaatttatgcaggcaatgtttatcattccgtacaataatgccataggccacctattcgtcttcctactgcaggtcatcacagaacacatttggtctagcgtgtccactccgcctttagtttgattataatacataaccatttgcggtttaccggtactttcgttgatagaagcatcctcatcacaagatgataataagtataccatcttagctggcttcggtttatatgagacgagagtaaggggtccgtcaaaacaaaacatcgatgttcccactggcctggagcgactgtttttcagtacttccggtatctcgcgtttgtttgatcgcacggttcccacaatggttaattcgagctcgcccggggtcctaggtcgacgatgtaggtcacggtctcgaagccgcggtgcgggtgccagggcgtgcccttgggctccccgggcgcgtactccacctcacccatctggtccatcatgatgaacgggtcgaggtggcggtagttgatcccggcgaacgcgcggcgcaccgggaagccctcgccctcgaaaccgctgggcgcggtggtcacggtgagcacgggacgtgcgacggcgtcggcgggtgcggatacgcggggcagcgtcagcgggttctcgacggtcacggcgggcatgtcgacgcaaagcttcgaccgttttaacctcgaaatatgcacatgtaaggacggatgtgagcgaacgccagtgatgaccgggatcagaggtaacctaccatggtggggattaggtgaccgttcgcaggtagtttgatcggagcgaatgttcggggggtctggcgtcagaggctctaaactttatgtaattcctgccgcgaaacacgcacgtatcaagcagtcagctgttctcttcgttcagcgcgcgccggtgttgcaaaacgagcgctcttcgccggcggtggctcgtgcgatagttcgttttgtcggtaatccgatgttgccgcgccgatatcatgtgatgttgtcacagtgcgcgaaattcgaatggtggtgtgcagtgattgtgttgtgacggcgagtggcgcgtgtgggtgcttagttttgggagatgttttcgtatttttttgttgataactcaggctttgttgctgtgttgtagtactattttccattgcgcggtgtccagcttttaattagtggcacatattcttagcaagtaaaaattattttgcatactattaaatttcttataaattattttctaaaattaagtttaccttttcaattttactaaaaatatcgatatatttattatcgctggaaaactacattattccacctctaagcaagaaccgttagttggcgcgtagctttaccacaaaattcctggaattgccgtacgcttcgcagttgtttcaagttgtctaagggacatacgattttttttgcctctgcgtcacgattttaacccaaaagcgagtttagttacatgtacattattattagataaagaagtatcgcgaatacttcagttgaataaactgtgcttggtttttgggtgaggatttgtggaaagtagagtgcgcgataaccgtaactttcgacccggattttcgcctcgagatggactataaggaccacgacggagactacaaggatcatgatattgattacaaagacgatgacgataagatggccccaaagaagaagcggaaggtcggtatccacggagtcccagcagccgacaagaagtacagcatcggcctggacatcggcaccaactctgtgggctgggccgtgatcaccgacgagtacaaggtgcccagcaagaaattcaaggtgctgggcaacaccgaccggcacagcatcaagaagaacctgatcggagccctgctgttcgacagcggcgaaacagccgaggccacccggctgaagagaaccgccagaagaagatacaccagacggaagaaccggatctgctatctgcaagagatcttcagcaacgagatggccaaggtggacgacagcttcttccacagactggaagagtccttcctggtggaagaggataagaagcacgagcggcaccccatcttcggcaacatcgtggacgaggtggcctaccacgagaagtaccccaccatctaccacctgagaaagaaactggtggacagcaccgacaaggccgacctgcggctgatctatctggccctggcccacatgatcaagttccggggccacttcctgatcgagggcgacctgaaccccgacaacagcgacgtggacaagctgttcatccagctggtgcagacctacaaccagctgttcgaggaaaaccccatcaacgccagcggcgtggacgccaaggccatcctgtctgccagactgagcaagagcagacggctggaaaatctgatcgcccagctgcccggcgagaagaagaatggcctgttcggaaacctgattgccctgagcctgggcctgacccccaacttcaagagcaacttcgacctggccgaggatgccaaactgcagctgagcaaggacacctacgacgacgacctggacaacctgctggcccagatcggcgaccagtacgccgacctgtttctggccgccaagaacctgtccgacgccatcctgctgagcgacatcctgagagtgaacaccgagatcaccaaggcccccctgagcgcctctatgatcaagagatacgacgagcaccaccaggacctgaccctgctgaaagctctcgtgcggcagcagctgcctgagaagtacaaagagattttcttcgaccagagcaagaacggctacgccggctacattgacggcggagccagccaggaagagttctacaagttcatcaagcccatcctggaaaagatggacggcaccgaggaactgctcgtgaagctgaacagagaggacctgctgcggaagcagcggaccttcgacaacggcagcatcccccaccagatccacctgggagagctgcacgccattctgcggcggcaggaagatttttacccattcctgaaggacaaccgggaaaagatcgagaagatcctgaccttccgcatcccctactacgtgggccctctggccaggggaaacagcagattcgcctggatgaccagaaagagcgaggaaaccatcaccccctggaacttcgaggaagtggtggacaagggcgcttccgcccagagcttcatcgagcggatgaccaacttcgataagaacctgcccaacgagaaggtgctgcccaagcacagcctgctgtacgagtacttcaccgtgtataacgagctgaccaaagtgaaatacgtgaccgagggaatgagaaagcccgccttcctgagcggcgagcagaaaaaggccatcgtggacctgctgttcaagaccaaccggaaagtgaccgtgaagcagctgaaagaggactacttcaagaaaatcgagtgcttcgactccgtggaaatctccggcgtggaagatcggttcaacgcctccctgggcacataccacgatctgctgaaaattatcaaggacaaggacttcctggacaatgaggaaaacgaggacattctggaagatatcgtgctgaccctgacactgtttgaggacagagagatgatcgaggaacggctgaaaacctatgcccacctgttcgacgacaaagtgatgaagcagctgaagcggcggagatacaccggctggggcaggctgagccggaagctgatcaacggcatccgggacaagcagtccggcaagacaatcctggatttcctgaagtccgacggcttcgccaacagaaacttcatgcagctgatccacgacgacagcctgacctttaaagaggacatccagaaagcccaggtgtccggccagggcgatagcctgcacgagcacattgccaatctggccggcagccccgccattaagaagggcatcctgcagacagtgaaggtggtggacgagctcgtgaaagtgatgggccggcacaagcccgagaacatcgtgatcgaaatggccagagagaaccagaccacccagaagggacagaagaacagccgcgagagaatgaagcggatcgaagagggcatcaaagagctgggcagccagatcctgaaagaacaccccgtggaaaacacccagctgcagaacgagaagctgtacctgtactacctgcagaatgggcgggatatgtacgtggaccaggaactggacatcaaccggctgtccgactacgatgtggaccatatcgtgcctcagagctttctgaaggacgactccatcgacaacaaggtgctgaccagaagcgacaagaaccggggcaagagcgacaacgtgccctccgaagaggtcgtgaagaagatgaagaactactggcggcagctgctgaacgccaagctgattacccagagaaagttcgacaatctgaccaaggccgagagaggcggcctgagcgaactggataaggccggcttcatcaagagacagctggtggaaacccggcagatcacaaagcacgtggcacagatcctggactcccggatgaacactaagtacgacgagaatgacaagctgatccgggaagtgaaagtgatcaccctgaagtccaagctggtgtccgatttccggaaggatttccagttttacaaagtgcgcgagatcaacaactaccaccacgcccacgacgcctacctgaacgccgtcgtgggaaccgccctgatcaaaaagtaccctaagctggaaagcgagttcgtgtacggcgactacaaggtgtacgacgtgcggaagatgatcgccaagagcgagcaggaaatcggcaaggctaccgccaagtacttcttctacagcaacatcatgaactttttcaagaccgagattaccctggccaacggcgagatccggaagcggcctctgatcgagacaaacggcgaaaccggggagatcgtgtgggataagggccgggattttgccaccgtgcggaaagtgctgagcatgccccaagtgaatatcgtgaaaaagaccgaggtgcagacaggcggcttcagcaaagagtctatcctgcccaagaggaacagcgataagctgatcgccagaaagaaggactgggaccctaagaagtacggcggcttcgacagccccaccgtggcctattctgtgctggtggtggccaaagtggaaaagggcaagtccaagaaactgaagagtgtgaaagagctgctggggatcaccatcatggaaagaagcagcttcgagaagaatcccatcgactttctggaagccaagggctacaaagaagtgaaaaaggacctgatcatcaagctgcctaagtactccctgttcgagctggaaaacggccggaagagaatgctggcctctgccggcgaactgcagaagggaaacgaactggccctgccctccaaatatgtgaacttcctgtacctggccagccactatgagaagctgaagggctcccccgaggataatgagcagaaacagctgtttgtggaacagcacaagcactacctggacgagatcatcgagcagatcagcgagttctccaagagagtgatcctggccgacgctaatctggacaaagtgctgtccgcctacaacaagcaccgggataagcccatcagagagcaggccgagaatatcatccacctgtttaccctgaccaatctgggagcccctgccgccttcaagtactttgacaccaccatcgaccggaagaggtacaccagcaccaaagaggtgctggacgccaccctgatccaccagagcatcaccggcctgtacgagacacggatcgacctgtctcagctgggaggcgacaaaaggccggcggccacgaaaaaggccggccaggcaaaaaagaaaaaggagggcagaggaagtcttctaacatgcggtgacgtggaggagaatcccggccctatggtgagcaagggcgaggagctgttcaccggggtggtgcccatcctggtcgagctggacggcgacgtaaacggccacaagttcagcgtgtccggcgagggcgagggcgatgccacctacggcaagctgaccctgaagttcatctgcaccaccagcaagctgcccgtgccctggcccaccctcgtgaccaccctgacctacggcgtgcagtgcttcagccgctaccccgaccacatgaagcagcacgacttcttcaagtccgccatgcccgaaggctacgtccaggagcgcaccatcttcttcaaggacgacggcaactacaagacccgcgccgaggtgaagttcgagggcgacaccctggtgaaccgcatcgagctgaagggcatcgacttcaaggaggacggcaacatcctggggcacaagctggagtacaactacaacagccacaacgtctatatcatggccgacaagcagaagaacggcatcaaggtgaacttcaagatccgccacaacatcgaggacggcagcgtgcagctcgccgaccactaccagcagaacacccccatcggcgacggccccgtgctgctgcccgacaaccactacctgagcacccagtccgccctgagcaaagaccccaacgagaagcgcgatcacatggtcctgctggagttcgtgaccgccgccgggatcactctcggcatggacgagctgtacaagtaattaattaactagaatgaatcgtttttaaaataacaaatcaattgttttataatattcgtacgattctttgattatgtaataaaatgtgatcattaggaagattacgaaaaatataaaaaatatgagttctgtgtgtataacaaatgctgtaaacgccacaattgtgtttgttgcaaataaacccatgattatttgattaaaattgttgttttctttgttcatagacaatagtgtgttttgcctaaacgtgtactgcataaactccatgcgagtgtatagcgagctagtggctaacgcttgccccaccaaagtagattcgtcaaaatcctcaatttcatcaccctcctccaagtttaacatttggccgtcggaattaacttctaaagatgccacataatctaataaatgaaatagagattcaaacgtggcgtcatcgtccgtttcgaccatttccgaaaagaactcgggcataaactctatgatttctctggacgtggtgttgtcgaaactctcaaagtacgcagtcaggaacgtgcgcgacatgtcgtcgggaaactcgcgcggaaacatgttgttgtaaccgaacgggtcccatagcgccaaaaccaaatctgccagcgtcaatagaatgagcacgatgccgacaatggagctggcttggatagcgattcgagttaacggccggggcgcgcccatactcggtggcctccccaccaccaacttttttgcactgcaaaaaaacacgcttttgcacgcgggcccatacatagtacaaactctacgtttcgtagactattttacataaatagtctacaccgttgtatacgctccaaatacactaccacacattgaacctttttgcagtgcaaaaaagtacgtgtcggcagtcacgtaggccggccttatcgggtcgcgtcctgtcacgtacgaatcacattatcggaccggacgagtgttgtcttatcgtgacaggacgccagcttcctgtgttgctaaccgcagccggacgcaactccttatcggaacaggacgcgcctccatatcagccgcgcgttatctcatgcgcgtgaccggacacgaggcgcccgtcccgcttatcgcgcctataaatacagcccgcaacgatctggtaaacacagttgaacagcatctgttacagcgacacaacatgagccggtccaacaacgccaacgcgcccacgccatccaaccgccgccgcaacctgtctctggtgatggtgcgctcctccaagaacgtcatcaaggagttcatgcgcttcaaggtgcgcatggagggcaccgtgaacggccacgagttcgagatcgagggcgagggcgagggccgcccctacgagggccacaacaccgtgaagctgaaggtgaccaagggcggccccctgcccttcgcctgggacatcctgtccccccagttccagtacggctccaaggtgtacgtgaagcaccccgccgacatccccgactacaagaagctgtccttccccgagggcttcaagtgggagcgcgtgatgaacttcgaggacggcggcgtggtgaccgtgacccaggactcctccctgcaggacggctgcttcatctacaaggtgaagttcatcggcgtgaacttcccctccgacggccccgtaatgcagaagaagaccatgggctgggaggcctccaccgagcgcctgtacccccgcgacggcgtgctgaagggcgagatccacaaggccctgaagctgaaggacggcggccactacctggtggagttcaagtccatctacatggccaagaagcccgtgcagctgcccggctactactacgtggactccaagctggacatcacctcccacaacgaggactacaccatcgtggagcagtacgagcgcaccgagggccgccaccacctgttcctgtaggactctagatcataatcagccataccacatttgtagaggttttacttgctttaaaaaacctcccacacctccccctgaacctgaaacataaaatgaatgcaattgttgttgttaacttgtttattgcagcttataatggttacaaataaagcaatagcatcacaaatttcacaaataaagcatttttttcactgcattctagttgtggtttgtccaaactcatcaatgtatcttaaagcttctaggccggccgatctcggatctgacaatgttcagtgcagagactcggctacgcctcgtggactttgaagttgaccaacaatgtttattcttacctctaatagtcctctgtggcaaggtcaagattctgttagaagccaatgaagaacctggttgttcaataacattttgttcgtctaatatttcactaccgcttgacgttggctgcacttcatgtacctcatctataaacgcttcttctgtatcgctctggacgtcatcttcacttacgtgatctgatatttcactgtcagaatcctcaccaacaagctcgtcatcgctttgcagaagagcagagaggatatgctcatcgtctaaagaactacccattttattatatattagtcacgatatctataacaagaaaatatatatataataagttatcacgtaagtagaacatgaaataacaatataattatcgtatgagttaaatcttaaaagtcacgtaaaagataatcatgcgtcattttgactcacgcggtcgttatagttcaaaatcagtgacacttaccgcattgacaagcacgcctcacgggagctccaagcggcgactgagatgtcctaaatgcacagcgacggattcgcgctatttagaaagagagagcaatatttcaagaatgcatgcgtcaattttacgcagactatctttctagggttaaaaaagatttgcgctttactcgacctaaactttaaacacgtcatagaatcttcgtttgacaaaaaccacattgtggccaagctgtgtgacgcgacgcgcgctaaagaatggcaaaccaagtcgcgcgagcgtcgactctagaggatccccgggtaccgagctcgaattcgtaatcatggtcatagctgtttcctgtgtgaaattgttatccgctcacaattccacacaacatacgagccggaagcataaagtgtaaagcctggggtgcctaatgagtgagctaactcacattaattgcgttgcgctcactgcccgctttccagtcgggaaacctgtcgtgccagctgcattaatgaatcggccaacgcgcggggagaggcggtttgcgtattgggcgctcttccgcttcctcgctcactgactcgctgcgctcggtcgttcggctgcggcgagcggtatcagctcactcaaaggcggtaatacggt

SEQ ID NO: 7 - DNA, 13680 bp, Artificial Sequence; identical to SEQ ID NO: 6
  pBac-dmeNanos-Cas9-2a-eGFP-p10-UTR-Opie2-dsRed

SEQ ID NO: 8 - DNA, 10231 bp, Artificial Sequence
  pBac-Ds-HL-U63-sxln-gRNA-U63UTR-opie-mVenus-SV40-U63-sxlm-gRNA-U6 3UT-HR
tatccacagaatcaggggataacgcaggaaagaacatgtgagcaaaaggccagcaaaaggccaggaaccgtaaaaaggccgcgttgctggcgtttttccataggctccgcccccctgacgagcatcacaaaaatcgacgctcaagtcagaggtggcgaaacccgacaggactataaagataccaggcgtttccccctggaagctccctcgtgcgctctcctgttccgaccctgccgcttaccggatacctgtccgcctttctcccttcgggaagcgtggcgctttctcaatgctcacgctgtaggtatctcagttcggtgtaggtcgttcgctccaagctgggctgtgtgcacgaaccccccgttcagcccgaccgctgcgccttatccggtaactatcgtcttgagtccaacccggtaagacacgacttatcgccactggcagcagccactggtaacaggattagcagagcgaggtatgtaggcggtgctacagagttcttgaagtggtggcctaactacggctacactagaaggacagtatttggtatctgcgctctgctgaagccagttaccttcggaaaaagagttggtagctcttgatccggcaaacaaaccaccgctggtagcggtggtttttttgtttgcaagcagcagattacgcgcagaaaaaaaggatctcaagaagatcctttgatcttttctacggggtctgacgctcagtggaacgaaaactcacgttaagggattttggtcatgagattatcaaaaaggatcttcacctagatccttttaaattaaaaatgaagttttaaatcaatctaaagtatatatgagtaaacttggtctgacagttaccaatgcttaatcagtgaggcacctatctcagcgatctgtctatttcgttcatccatagttgcctgactccccgtcgtgtagataactacgatacgggagggcttaccatctggccccagtgctgcaatgataccgcgagacccacgctcaccggctccagatttatcagcaataaaccagccagccggaagggccgagcgcagaagtggtcctgcaactttatccgcctccatccagtctattaattgttgccgggaagctagagtaagtagttcgccagttaatagtttgcgcaacgttgttgccattgctacaggcatcgtggtgtcacgctcgtcgtttggtatggcttcattcagctccggttcccaacgatcaaggcgagttacatgatcccccatgttgtgcaaaaaagcggttagctccttcggtcctccgatcgttgtcagaagtaagttggccgcagtgttatcactcatggttatggcagcactgcataattctcttactgtcatgccatccgtaagatgcttttctgtgactggtgagtactcaaccaagtcattctgagaatagtgtatgcggcgaccgagttgctcttgcccggcgtcaatacgggataataccgcgccacatagcagaactttaaaagtgctcatcattggaaaacgttcttcggggcgaaaactctcaaggatcttaccgctgttgagatccagttcgatgtaacccactcgtgcacccaactgatcttcagcatcttttactttcaccagcgtttctgggtgagcaaaaacaggaaggcaaaatgccgcaaaaaagggaataagggcgacacggaaatgttgaatactcatactcttcctttttcaatattattgaagcatttatcagggttattgtctcatgagcggatacatatttgaatgtatttagaaaaataaacaaataggggttccgcgcacatttccccgaaaagtgccacctgacgtctaagaaaccattattatcatgacattaacctataaaaataggcgtatcacgaggccctttcgtctcgcgcgtttcggtgatgacggtgaaaacctctgacacatgcagctcccggagacggtcacagcttgtctgtaagcggatgccgggagcagacaagcccgtcagggcgcgtcagcgggtgttggcgggtgtcggggctggcttaactatgcggcatcagagcagattgtactgagagtgcaccatatgcggtgtgaaataccgcacagatgcgtaaggagaaaataccgcatcaggcgccattcgccattcaggctgcgcaactgttgggaagggcgatcggtgcgggcctcttcgctattacgccagctggcgaaagggggatgtgctgcaaggcgattaagttgggtaacgccagggttttcccagtcacgacgttgtaaaacgacggccagtgccaagctttgtttaaaatataacaaaattgtgatcccacaaaatgaagtggggcaaaatcaaataattaactagtgtccgtaaacttgttggtcttcaactttttgaggaacacgttggacggcaaatcgtgactataacacaagttgatttaataattttagccaacacgtcgggctgcgtgttttttgcgctctgtgtacacgttgattaactggtcgattaaataatttaatttttggttcttctttaaatctgtgatgaaattttttaaaataactttaaattcttcattggtaaaaaatgccacgttttgcaacttgtgagggtctaatatgaggtcaaactcagtaggagttttatccaaaaaagaaaacatgattacgtctgtacacgaacgcgtattaacgcagagtgcaaagtataagagggttaaaaaatatattttacgcaccatatacgcatcgggttgatatcgttaatatggatcaatttgaacagttgattaacgtgtctctgctcaagtctttgatcaaaacgcaaatcgacgaaaatgtgtcggacaatatcaagtcgatgagcgaaaaactaaaaaggctagaatacgacaatctcacagacagcgttgagatatacggtattcacgacagcaggctgaataataaaaaaattagaaactattatttaaccctagaaagataatcatattgtgacgtacgttaaagataatcatgcgtaaaattgacgcatgtgttttatcggtctgtatatcgaggtttatttattaatttgaatagatattaagttttattatatttacacttacatactaataataaattcaacaaacaatttatttatgtttatttatttattaaaaaaaaacaaaaactcaaaatttcttctataaagtaacaaaacttttaaacattctctcttttacaaaaataaacttattttgtactttaaaaacagtcatgttgtattataaaataagtaattagcttaacttatacataatagaaacaaattatacttattagtcagtcagaaacaactttggcacatatcaatattatgctctcgacaaataacttttttgcattttttgcacgatgcatttgcctttcgccttattttagaggggcagtaagtacagtaagtacgttttttcattactggctcttcagtactgtcatctgatgtaccaggcacttcatttggcaaaatattagagatattatcgcgcaaatatctcttcaaagtaggagcttctaaacgcttacgcataaacgatgacgtcaggctcatgtaaaggtttctcataaattttttgcgactttgaaccttttctcccttgctactgacattatggctgtatataataaaagaatttatgcaggcaatgtttatcattccgtacaataatgccataggccacctattcgtcttcctactgcaggtcatcacagaacacatttggtctagcgtgtccactccgcctttagtttgattataatacataaccatttgcggtttaccggtactttcgttgatagaagcatcctcatcacaagatgataataagtataccatcttagctggcttcggtttatatgagacgagagtaaggggtccgtcaaaacaaaacatcgatgttcccactggcctggagcgactgtttttcagtacttccggtatctcgcgtttgtttgatcgcacggttcccacaatggttaattcgagctcgcccggggtttaaacacccgtactttaagttatcctgatttggaaaaaaattttaacatttgaagtttttattgtttagaaaattcaatggagtcgccccacatatgggacagggttggctttatctggtgcctgtcagtgtgtttaatacttttccatctattactgtcaagtataaactaaagtttatatagaccgttttcccattttcataaacaaatttggaagactgcaaaatcttattttgcttctccaagtttgtatgctcctttattaagcattcctttgtttcctttatgaatttcaactttagagacctgcagaacctgatagattgtggaaatcaattgttccatagtatatttccgctagaatcaatcattcgtaaaggagtttctgctgtggcgaatatactgccatcgacatcacacttctgtggacctgcaaatccctgtttgtagttcgaatgacctgagcttccatcgtatccataactaagtagaagttcggcgattaaaaatgttgtcccttgatctttccttattttctaaacaacttttttttgtaaagttaaaatccggccagctgtgtggttaagcaaacttagcaaaggcacttctgcttttgtgtcattcgttctttttgtttgcaacttcgtagtacgaggaaaaaggttgtttttcgtttgatctctaattgagatattttgttgcttggttaaattttgatcttaaagaacagctagtgcgtcgttaaatagtattttctccaatttcgcgaggggctgacttattaaggtgtgcatgctcttggctttttcagggcagatagcaaacagttttataatacatgccagatctgatttactgcccttacgcgcagccgcactagctgaatttattaataatttaatatttccagccgtggatttgatcaaattttaagctgctcttctctgagcccttgctctcgacaacaaataaggcaatgcggccgctttttgctcacctgtgattgctcctactcaaatacaaaaacatcaaattttctgtcaataaagcatatttatttatatttattttacaggaaagaattccttttaaagtgtattttaacctataatgaaaaacgattaaaaaaaatacataaaataattcgaaaatttttgaatagcccaggttgataaaaattcatttcatacgttttataacttatgcccctaagtattttttgaccatagtgtttcaattctacattaattttacagagtagaatgaaacgccacctactcagccaagaggcgaaaaggttagctcgccaagcagagagggcgccagtgctcactactttttataattctcaacttctttttccagactcagttcgtatatatagacctattttcaatttaacgtcggattgtcaactacttgccccgttttagagctagaaatagcaagttaaaataaggctagtccgttatcaacttgaaaaagtggcaccgagtcggtgcttttttgcctacctggagcctgagagttgttcaataaaataaaaatgtttcgtttttttgctttcgccagtatttattatttttcatcaatatgtattcaatttggtatgtatttagtaattgtaatatatagacaatggttttccgttgacgtacatacatctgacgtgtgtttatttagacataatagttatgttttcacatctttttaatgttcgcttaatgcgtatgcattaattaacatactcggtggcctccccaccaccaacttttttgcactgcaaaaaaacacgcttttgcacgcgggcccatacatagtacaaactctacgtttcgtagactattttacataaatagtctacaccgttgtatacgctccaaatacactaccacacattgaacctttttgcagtgcaaaaaagtacgtgtcggcagtcacgtaggccggccttatcgggtcgcgtcctgtcacgtacgaatcacattatcggaccggacgagtgttgtcttatcgtgacaggacgccagcttcctgtgttgctaaccgcagccggacgcaactccttatcggaacaggacgcgcctccatatcagccgcgcgttatctcatgcgcgtgaccggacacgaggcgcccgtcccgcttatcgcgcctataaatacagcccgcaacgatctggtaaacacagttgaacagcatctgttacagcgacacaacatgagccggtccaacaacgccaacgcgcccacgccatccaaccgccgccgcaacctgtctctggtggctagcatggtgagcaagggcgaggagctgttcaccggggtggtgcccatcctggtcgagctggacggcgacgtaaacggccacaagttcagcgtgtccggcgagggcgagggcgatgccacctacggcaagctgaccctgaagctgatctgcaccaccggcaagctgcccgtgccctggcccaccctcgtgaccaccctgggctacggcctgcagtgcttcgcccgctaccccgaccacatgaagcagcacgacttcttcaagtccgccatgcccgaaggctacgtccaggagcgcaccatcttcttcaaggacgacggcaactacaagacccgcgccgaggtgaagttcgagggcgacaccctggtgaaccgcatcgagctgaagggcatcgacttcaaggaggacggcaacatcctggggcacaagctggagtacaactacaacagccacaacgtctatatcaccgccgacaagcagaagaacggcatcaaggccaacttcaagatccgccacaacatcgaggacggcggcgtgcagctcgccgaccactaccagcagaacacccccatcggcgacggccccgtgctgctgcccgacaaccactacctgagctaccagtccaagctgagcaaagaccccaacgagaagcgcgatcacatggtcctgctggagttcgtgaccgccgccgggatcactctcggcatggacgagctgtacaagtaagcgctgactctagatcataatcagccataccacatttgtagaggttttacttgctttaaaaaacctcccacacctccccctgaacctgaaacataaaatgaatgcaattgttgttgttaacttgtttattgcagcttataatggttacaaataaagcaatagcatcacaaatttcacaaataaagcatttttttcactgcattctagttgtggtttgtccaaactcatcaatgtatcttaaagcttccttaagtttttgctcacctgtgattgctcctactcaaatacaaaaacatcaaattttctgtcaataaagcatatttatttatatttattttacaggaaagaattccttttaaagtgtattttaacctataatgaaaaacgattaaaaaaaatacataaaataattcgaaaatttttgaatagcccaggttgataaaaattcatttcatacgttttataacttatgcccctaagtattttttgaccatagtgtttcaattctacattaattttacagagtagaatgaaacgccacctactcagccaagaggcgaaaaggttagctcgccaagcagagagggcgccagtgctcactactttttataattctcaacttctttttccagactcagttcgtatatatagacctattttcaatttaacgtcgggcggcagcggcgggaatgggttttagagctagaaatagcaagttaaaataaggctagtccgttatcaacttgaaaaagtggcaccgagtcggtgcttttttgcctacctggagcctgagagttgttcaataaaataaaaatgtttcgtttttttgctttcgccagtatttattatttttcatcaatatgtattcaatttggtatgtatttagtaattgtaatatatagacaatggttttccgttgacgtacatacatctgacgtgtgtttatttagacataatagttatgttttcacatctttttaatgttcgcttaatgcgtatgcatctcgagcctatctatgcaaatctcagtgtgggatgtaagccaagttgagtactttttcttgaaatgattaaaatttcttttgcaatatgtctatttgcgggacaatctataacaaaaagtttcgctttgtttttttaaaacatcctcataagcatctgaaacagctattgaagctctaaatctgtcaaatattgcctgctgtttctcacgctttttctctccagaactccaagtctcaaacaattctgaattggccaacctgaggttgtgacctaaaaatgtatattttagtgttagtttttattgttaatttgtacacgtaaagcggcaattaaaagcactcaacacaaacaaatccaacttgtgacgaccacaaacatatagtacgaaccgctctctttcgatgccatgacaacttgtttgatataaacttagattggtgctttatttttaataattttaaacggactcttttttccgcagagtagctttcgtgcacccgtgataccgaacagctgttttaacagcctatatattttaacagatcgtgactcagataaaatttctgttacgtaacattgaagtttgattttaatattaacgactttcaaaaaatggatttttgcccacaaaacgtgatcagccagcctaaagtgcactcgctgcaaataggaccgcacgcgtaatgtattttagtattttctacgagttaaattaatttttgtatttgacgtttcgggatgtttttaaaaaaggtagttgttgttgcggcagtacccagtagccttccagcggctcgaaactgaacatttgatctcatcctgaaaagaaatattgctatgctcatttctaagaaaatgaccaacctccatcttgtgtcctgcttggcaagactttgcacctgttgcaccaaaagtacattattttcactacgcttgcttgaatagaattctcatcggcgcgcctaggccggccgatctcggatctgacaatgttcagtgcagagactcggctacgcctcgtggactttgaagttgaccaacaatgtttattcttacctctaatagtcctctgtggcaaggtcaagattctgttagaagccaatgaagaacctggttgttcaataacattttgttcgtctaatatttcactaccgcttgacgttggctgcacttcatgtacctcatctataaacgcttcttctgtatcgctctggacgtcatcttcacttacgtgatctgatatttcactgtcagaatcctcaccaacaagctcgtcatcgctttgcagaagagcagagaggatatgctcatcgtctaaagaactacccattttattatatattagtcacgatatctataacaagaaaatatatatataataagttatcacgtaagtagaacatgaaataacaatataattatcgtatgagttaaatcttaaaagtcacgtaaaagataatcatgcgtcattttgactcacgcggtcgttatagttcaaaatcagtgacacttaccgcattgacaagcacgcctcacgggagctccaagcggcgactgagatgtcctaaatgcacagcgacggattcgcgctatttagaaagagagagcaatatttcaagaatgcatgcgtcaattttacgcagactatctttctagggttaaaaaagatttgcgctttactcgacctaaactttaaacacgtcatagaatcttcgtttgacaaaaaccacattgtggccaagctgtgtgacgcgacgcgcgctaaagaatggcaaaccaagtcgcgcgagcgtcgactctagaggatccccgggtaccgagctcgaattcgtaatcatggtcatagctgtttcctgtgtgaaattgttatccgctcacaattccacacaacatacgagccggaagcataaagtgtaaagcctggggtgcctaatgagtgagctaactcacattaattgcgttgcgctcactgcccgctttccagtcgggaaacctgtcgtgccagctgcattaatgaatcggccaacgcgcggggagaggcggtttgcgtattgggcgctcttccgcttcctcgctcactgactcgctgcgctcggtcgttcggctgcggcgagcggtatcagctcactcaaaggcggtaatacggt

SEQ ID NO: 9 - DNA, 10983 bp, Artificial Sequence
  pBac-Ds-HL-U63-sxln-gRNA-U63UTR-opie-mVenus-SV40-U63-sxlm-gRNA-U6 3UT-HR -U63-Btub1-UTR
tatccacagaatcaggggataacgcaggaaagaacatgtgagcaaaaggccagcaaaaggccaggaaccgtaaaaaggccgcgttgctggcgtttttccataggctccgcccccctgacgagcatcacaaaaatcgacgctcaagtcagaggtggcgaaacccgacaggactataaagataccaggcgtttccccctggaagctccctcgtgcgctctcctgttccgaccctgccgcttaccggatacctgtccgcctttctcccttcgggaagcgtggcgctttctcaatgctcacgctgtaggtatctcagttcggtgtaggtcgttcgctccaagctgggctgtgtgcacgaaccccccgttcagcccgaccgctgcgccttatccggtaactatcgtcttgagtccaacccggtaagacacgacttatcgccactggcagcagccactggtaacaggattagcagagcgaggtatgtaggcggtgctacagagttcttgaagtggtggcctaactacggctacactagaaggacagtatttggtatctgcgctctgctgaagccagttaccttcggaaaaagagttggtagctcttgatccggcaaacaaaccaccgctggtagcggtggtttttttgtttgcaagcagcagattacgcgcagaaaaaaaggatctcaagaagatcctttgatcttttctacggggtctgacgctcagtggaacgaaaactcacgttaagggattttggtcatgagattatcaaaaaggatcttcacctagatccttttaaattaaaaatgaagttttaaatcaatctaaagtatatatgagtaaacttggtctgacagttaccaatgcttaatcagtgaggcacctatctcagcgatctgtctatttcgttcatccatagttgcctgactccccgtcgtgtagataactacgatacgggagggcttaccatctggccccagtgctgcaatgataccgcgagacccacgctcaccggctccagatttatcagcaataaaccagccagccggaagggccgagcgcagaagtggtcctgcaactttatccgcctccatccagtctattaattgttgccgggaagctagagtaagtagttcgccagttaatagtttgcgcaacgttgttgccattgctacaggcatcgtggtgtcacgctcgtcgtttggtatggcttcattcagctccggttcccaacgatcaaggcgagttacatgatcccccatgttgtgcaaaaaagcggttagctccttcggtcctccgatcgttgtcagaagtaagttggccgcagtgttatcactcatggttatggcagcactgcataattctcttactgtcatgccatccgtaagatgcttttctgtgactggtgagtactcaaccaagtcattctgagaatagtgtatgcggcgaccgagttgctcttgcccggcgtcaatacgggataataccgcgccacatagcagaactttaaaagtgctcatcattggaaaacgttcttcggggcgaaaactctcaaggatcttaccgctgttgagatccagttcgatgtaacccactcgtgcacccaactgatcttcagcatcttttactttcaccagcgtttctgggtgagcaaaaacaggaaggcaaaatgccgcaaaaaagggaataagggcgacacggaaatgttgaatactcatactcttcctttttcaatattattgaagcatttatcagggttattgtctcatgagcggatacatatttgaatgtatttagaaaaataaacaaataggggttccgcgcacatttccccgaaaagtgccacctgacgtctaagaaaccattattatcatgacattaacctataaaaataggcgtatcacgaggccctttcgtctcgcgcgtttcggtgatgacggtgaaaacctctgacacatgcagctcccggagacggtcacagcttgtctgtaagcggatgccgggagcagacaagcccgtcagggcgcgtcagcgggtgttggcgggtgtcggggctggcttaactatgcggcatcagagcagattgtactgagagtgcaccatatgcggtgtgaaataccgcacagatgcgtaaggagaaaataccgcatcaggcgccattcgccattcaggctgcgcaactgttgggaagggcgatcggtgcgggcctcttcgctattacgccagctggcgaaagggggatgtgctgcaaggcgattaagttgggtaacgccagggttttcccagtcacgacgttgtaaaacgacggccagtgccaagctttgtttaaaatataacaaaattgtgatcccacaaaatgaagtggggcaaaatcaaataattaactagtgtccgtaaacttgttggtcttcaactttttgaggaacacgttggacggcaaatcgtgactataacacaagttgatttaataattttagccaacacgtcgggctgcgtgttttttgcgctctgtgtacacgttgattaactggtcgattaaataatttaatttttggttcttctttaaatctgtgatgaaattttttaaaataactttaaattcttcattggtaaaaaatgccacgttttgcaacttgtgagggtctaatatgaggtcaaactcagtaggagttttatccaaaaaagaaaacatgattacgtctgtacacgaacgcgtattaacgcagagtgcaaagtataagagggttaaaaaatatattttacgcaccatatacgcatcgggttgatatcgttaatatggatcaatttgaacagttgattaacgtgtctctgctcaagtctttgatcaaaacgcaaatcgacgaaaatgtgtcggacaatatcaagtcgatgagcgaaaaactaaaaaggctagaatacgacaatctcacagacagcgttgagatatacggtattcacgacagcaggctgaataataaaaaaattagaaactattatttaaccctagaaagataatcatattgtgacgtacgttaaagataatcatgcgtaaaattgacgcatgtgttttatcggtctgtatatcgaggtttatttattaatttgaatagatattaagttttattatatttacacttacatactaataataaattcaacaaacaatttatttatgtttatttatttattaaaaaaaaacaaaaactcaaaatttcttctataaagtaacaaaacttttaaacattctctcttttacaaaaataaacttattttgtactttaaaaacagtcatgttgtattataaaataagtaattagcttaacttatacataatagaaacaaattatacttattagtcagtcagaaacaactttggcacatatcaatattatgctctcgacaaataacttttttgcattttttgcacgatgcatttgcctttcgccttattttagaggggcagtaagtacagtaagtacgttttttcattactggctcttcagtactgtcatctgatgtaccaggcacttcatttggcaaaatattagagatattatcgcgcaaatatctcttcaaagtaggagcttctaaacgcttacgcataaacgatgacgtcaggctcatgtaaaggtttctcataaattttttgcgactttgaaccttttctcccttgctactgacattatggctgtatataataaaagaatttatgcaggcaatgtttatcattccgtacaataatgccataggccacctattcgtcttcctactgcaggtcatcacagaacacatttggtctagcgtgtccactccgcctttagtttgattataatacataaccatttgcggtttaccggtactttcgttgatagaagcatcctcatcacaagatgataataagtataccatcttagctggcttcggtttatatgagacgagagtaaggggtccgtcaaaacaaaacatcgatgttcccactggcctggagcgactgtttttcagtacttccggtatctcgcgtttgtttgatcgcacggttcccacaatggttaattcgagctcgcccggggtttaaacacccgtactttaagttatcctgatttggaaaaaaattttaacatttgaagtttttattgtttagaaaattcaatggagtcgccccacatatgggacagggttggctttatctggtgcctgtcagtgtgtttaatacttttccatctattactgtcaagtataaactaaagtttatatagaccgttttcccattttcataaacaaatttggaagactgcaaaatcttattttgcttctccaagtttgtatgctcctttattaagcattcctttgtttcctttatgaatttcaactttagagacctgcagaacctgatagattgtggaaatcaattgttccatagtatatttccgctagaatcaatcattcgtaaaggagtttctgctgtggcgaatatactgccatcgacatcacacttctgtggacctgcaaatccctgtttgtagttcgaatgacctgagcttccatcgtatccataactaagtagaagttcggcgattaaaaatgttgtcccttgatctttccttattttctaaacaacttttttttgtaaagttaaaatccggccagctgtgtggttaagcaaacttagcaaaggcacttctgcttttgtgtcattcgttctttttgtttgcaacttcgtagtacgaggaaaaaggttgtttttcgtttgatctctaattgagatattttgttgcttggttaaattttgatcttaaagaacagctagtgcgtcgttaaatagtattttctccaatttcgcgaggggctgacttattaaggtgtgcatgctcttggctttttcagggcagatagcaaacagttttataatacatgccagatctgatttactgcccttacgcgcagccgcactagctgaatttattaataatttaatatttccagccgtggatttgatcaaattttaagctgctcttctctgagcccttgctctcgacaacaaataaggcaatgcggccgctttttgctcacctgtgattgctcctactcaaatacaaaaacatcaaattttctgtcaataaagcatatttatttatatttattttacaggaaagaattccttttaaagtgtattttaacctataatgaaaaacgattaaaaaaaatacataaaataattcgaaaatttttgaatagcccaggttgataaaaattcatttcatacgttttataacttatgcccctaagtattttttgaccatagtgtttcaattctacattaattttacagagtagaatgaaacgccacctactcagccaagaggcgaaaaggttagctcgccaagcagagagggcgccagtgctcactactttttataattctcaacttctttttccagactcagttcgtatatatagacctattttcaatttaacgtcggattgtcaactacttgccccgttttagagctagaaatagcaagttaaaataaggctagtccgttatcaacttgaaaaagtggcaccgagtcggtgcttttttgcctacctggagcctgagagttgttcaataaaataaaaatgtttcgtttttttgctttcgccagtatttattatttttcatcaatatgtattcaatttggtatgtatttagtaattgtaatatatagacaatggttttccgttgacgtacatacatctgacgtgtgtttatttagacataatagttatgttttcacatctttttaatgttcgcttaatgcgtatgcattaattaacatactcggtggcctccccaccaccaacttttttgcactgcaaaaaaacacgcttttgcacgcgggcccatacatagtacaaactctacgtttcgtagactattttacataaatagtctacaccgttgtatacgctccaaatacactaccacacattgaacctttttgcagtgcaaaaaagtacgtgtcggcagtcacgtaggccggccttatcgggtcgcgtcctgtcacgtacgaatcacattatcggaccggacgagtgttgtcttatcgtgacaggacgccagcttcctgtgttgctaaccgcagccggacgcaactccttatcggaacaggacgcgcctccatatcagccgcgcgttatctcatgcgcgtgaccggacacgaggcgcccgtcccgcttatcgcgcctataaatacagcccgcaacgatctggtaaacacagttgaacagcatctgttacagcgacacaacatgagccggtccaacaacgccaacgcgcccacgccatccaaccgccgccgcaacctgtctctggtggctagcatggtgagcaagggcgaggagctgttcaccggggtggtgcccatcctggtcgagctggacggcgacgtaaacggccacaagttcagcgtgtccggcgagggcgagggcgatgccacctacggcaagctgaccctgaagctgatctgcaccaccggcaagctgcccgtgccctggcccaccctcgtgaccaccctgggctacggcctgcagtgcttcgcccgctaccccgaccacatgaagcagcacgacttcttcaagtccgccatgcccgaaggctacgtccaggagcgcaccatcttcttcaaggacgacggcaactacaagacccgcgccgaggtgaagttcgagggcgacaccctggtgaaccgcatcgagctgaagggcatcgacttcaaggaggacggcaacatcctggggcacaagctggagtacaactacaacagccacaacgtctatatcaccgccgacaagcagaagaacggcatcaaggccaacttcaagatccgccacaacatcgaggacggcggcgtgcagctcgccgaccactaccagcagaacacccccatcggcgacggccccgtgctgctgcccgacaaccactacctgagctaccagtccaagctgagcaaagaccccaacgagaagcgcgatcacatggtcctgctggagttcgtgaccgccgccgggatcactctcggcatggacgagctgtacaagtaagcgctgactctagatcataatcagccataccacatttgtagaggttttacttgctttaaaaaacctcccacacctccccctgaacctgaaacataaaatgaatgcaattgttgttgttaacttgtttattgcagcttataatggttacaaataaagcaatagcatcacaaatttcacaaataaagcatttttttcactgcattctagttgtggtttgtccaaactcatcaatgtatcttaaagcttccttaagtttttgctcacctgtgattgctcctactcaaatacaaaaacatcaaattttctgtcaataaagcatatttatttatatttattttacaggaaagaattccttttaaagtgtattttaacctataatgaaaaacgattaaaaaaaatacataaaataattcgaaaatttttgaatagcccaggttgataaaaattcatttcatacgttttataacttatgcccctaagtattttttgaccatagtgtttcaattctacattaattttacagagtagaatgaaacgccacctactcagccaagaggcgaaaaggttagctcgccaagcagagagggcgccagtgctcactactttttataattctcaacttctttttccagactcagttcgtatatatagacctattttcaatttaacgtcgggcggcagcggcgggaatgggttttagagctagaaatagcaagttaaaataaggctagtccgttatcaacttgaaaaagtggcaccgagtcggtgcttttttgcctacctggagcctgagagttgttcaataaaataaaaatgtttcgtttttttgctttcgccagtatttattatttttcatcaatatgtattcaatttggtatgtatttagtaattgtaatatatagacaatggttttccgttgacgtacatacatctgacgtgtgtttatttagacataatagttatgttttcacatctttttaatgttcgcttaatgcgtatgcatctcgagcctatctatgcaaatctcagtgtgggatgtaagccaagttgagtactttttcttgaaatgattaaaatttcttttgcaatatgtctatttgcgggacaatctataacaaaaagtttcgctttgtttttttaaaacatcctcataagcatctgaaacagctattgaagctctaaatctgtcaaatattgcctgctgtttctcacgctttttctctccagaactccaagtctcaaacaattctgaattggccaacctgaggttgtgacctaaaaatgtatattttagtgttagtttttattgttaatttgtacacgtaaagcggcaattaaaagcactcaacacaaacaaatccaacttgtgacgaccacaaacatatagtacgaaccgctctctttcgatgccatgacaacttgtttgatataaacttagattggtgctttatttttaataattttaaacggactcttttttccgcagagtagctttcgtgcacccgtgataccgaacagctgttttaacagcctatatattttaacagatcgtgactcagataaaatttctgttacgtaacattgaagtttgattttaatattaacgactttcaaaaaatggatttttgcccacaaaacgtgatcagccagcctaaagtgcactcgctgcaaataggaccgcacgcgtaatgtattttagtattttctacgagttaaattaatttttgtatttgacgtttcgggatgtttttaaaaaaggtagttgttgttgcggcagtacccagtagccttccagcggctcgaaactgaacatttgatctcatcctgaaaagaaatattgctatgctcatttctaagaaaatgaccaacctccatcttgtgtcctgcttggcaagactttgcacctgttgcaccaaaagtacattattttcactacgcttgcttgaatagaattctcatcggcgcgcctttttgctcacctgtgattgctcctactcaaatacaaaaacatcaaattttctgtcaataaagcatatttatttatatttattttacaggaaagaattccttttaaagtgtattttaacctataatgaaaaacgattaaaaaaaatacataaaataattcgaaaatttttgaatagcccaggttgataaaaattcatttcatacgttttataacttatgcccctaagtattttttgaccatagtgtttcaattctacattaattttacagagtagaatgaaacgccacctactcagccaagaggcgaaaaggttagctcgccaagcagagagggcgccagtgctcactactttttataattctcaacttctttttccagactcagttcgtatatatagacctattttcaatttaacgtcgtggcggtaccggctccggaagttttagagctagaaatagcaagttaaaataaggctagtccgttatcaacttgaaaaagtggcaccgagtcggtgcttttttgcctacctggagcctgagagttgttcaataaaataaaaatgtttcgtttttttgctttcgccagtatttattatttttcatcaatatgtattcaatttggtatgtatttagtaattgtaatatatagacaatggttttccgttgacgtacatacatctgacgtgtgtttatttagacataatagttatgttttcacatctttttaatgttcgcttaatgcgtatgcatcctaggccggccgatctcggatctgacaatgttcagtgcagagactcggctacgcctcgtggactttgaagttgaccaacaatgtttattcttacctctaatagtcctctgtggcaaggtcaagattctgttagaagccaatgaagaacctggttgttcaataacattttgttcgtctaatatttcactaccgcttgacgttggctgcacttcatgtacctcatctataaacgcttcttctgtatcgctctggacgtcatcttcacttacgtgatctgatatttcactgtcagaatcctcaccaacaagctcgtcatcgctttgcagaagagcagagaggatatgctcatcgtctaaagaactacccattttattatatattagtcacgatatctataacaagaaaatatatatataataagttatcacgtaagtagaacatgaaataacaatataattatcgtatgagttaaatcttaaaagtcacgtaaaagataatcatgcgtcattttgactcacgcggtcgttatagttcaaaatcagtgacacttaccgcattgacaagcacgcctcacgggagctccaagcggcgactgagatgtcctaaatgcacagcgacggattcgcgctatttagaaagagagagcaatatttcaagaatgcatgcgtcaattttacgcagactatctttctagggttaaaaaagatttgcgctttactcgacctaaactttaaacacgtcatagaatcttcgtttgacaaaaaccacattgtggccaagctgtgtgacgcgacgcgcgctaaagaatggcaaaccaagtcgcgcgagcgtcgactctagaggatccccgggtaccgagctcgaattcgtaatcatggtcatagctgtttcctgtgtgaaattgttatccgctcacaattccacacaacatacgagccggaagcataaagtgtaaagcctggggtgcctaatgagtgagctaactcacattaattgcgttgcgctcactgcccgctttccagtcgggaaacctgtcgtgccagctgcattaatgaatcggccaacgcgcggggagaggcggtttgcgtattgggcgctcttccgcttcctcgctcactgactcgctgcgctcggtcgttcggctgcggcgagcggtatcagctcactcaaaggcggtaatacggt

SEQ ID NO: 10 - DNA, 10983 bp, Artificial Sequence
  pBac-Ds-HL-U63-sxln-gRNA-U63UTR-opie-mVenus-SV40-U63-sxlm-gRNA-U6 3UT-HR -U63-Btub2-UTR
tatccacagaatcaggggataacgcaggaaagaacatgtgagcaaaaggccagcaaaaggccaggaaccgtaaaaaggccgcgttgctggcgtttttccataggctccgcccccctgacgagcatcacaaaaatcgacgctcaagtcagaggtggcgaaacccgacaggactataaagataccaggcgtttccccctggaagctccctcgtgcgctctcctgttccgaccctgccgcttaccggatacctgtccgcctttctcccttcgggaagcgtggcgctttctcaatgctcacgctgtaggtatctcagttcggtgtaggtcgttcgctccaagctgggctgtgtgcacgaaccccccgttcagcccgaccgctgcgccttatccggtaactatcgtcttgagtccaacccggtaagacacgacttatcgccactggcagcagccactggtaacaggattagcagagcgaggtatgtaggcggtgctacagagttcttgaagtggtggcctaactacggctacactagaaggacagtatttggtatctgcgctctgctgaagccagttaccttcggaaaaagagttggtagctcttgatccggcaaacaaaccaccgctggtagcggtggtttttttgtttgcaagcagcagattacgcgcagaaaaaaaggatctcaagaagatcctttgatcttttctacggggtctgacgctcagtggaacgaaaactcacgttaagggattttggtcatgagattatcaaaaaggatcttcacctagatccttttaaattaaaaatgaagttttaaatcaatctaaagtatatatgagtaaacttggtctgacagttaccaatgcttaatcagtgaggcacctatctcagcgatctgtctatttcgttcatccatagttgcctgactccccgtcgtgtagataactacgatacgggagggcttaccatctggccccagtgctgcaatgataccgcgagacccacgctcaccggctccagatttatcagcaataaaccagccagccggaagggccgagcgcagaagtggtcctgcaactttatccgcctccatccagtctattaattgttgccgggaagctagagtaagtagttcgccagttaatagtttgcgcaacgttgttgccattgctacaggcatcgtggtgtcacgctcgtcgtttggtatggcttcattcagctccggttcccaacgatcaaggcgagttacatgatcccccatgttgtgcaaaaaagcggttagctccttcggtcctccgatcgttgtcagaagtaagttggccgcagtgttatcactcatggttatggcagcactgcataattctcttactgtcatgccatccgtaagatgcttttctgtgactggtgagtactcaaccaagtcattctgagaatagtgtatgcggcgaccgagttgctcttgcccggcgtcaatacgggataataccgcgccacatagcagaactttaaaagtgctcatcattggaaaacgttcttcggggcgaaaactctcaaggatcttaccgctgttgagatccagttcgatgtaacccactcgtgcacccaactgatcttcagcatcttttactttcaccagcgtttctgggtgagcaaaaacaggaaggcaaaatgccgcaaaaaagggaataagggcgacacggaaatgttgaatactcatactcttcctttttcaatattattgaagcatttatcagggttattgtctcatgagcggatacatatttgaatgtatttagaaaaataaacaaataggggttccgcgcacatttccccgaaaagtgccacctgacgtctaagaaaccattattatcatgacattaacctataaaaataggcgtatcacgaggccctttcgtctcgcgcgtttcggtgatgacggtgaaaacctctgacacatgcagctcccggagacggtcacagcttgtctgtaagcggatgccgggagcagacaagcccgtcagggcgcgtcagcgggtgttggcgggtgtcggggctggcttaactatgcggcatcagagcagattgtactgagagtgcaccatatgcggtgtgaaataccgcacagatgcgtaaggagaaaataccgcatcaggcgccattcgccattcaggctgcgcaactgttgggaagggcgatcggtgcgggcctcttcgctattacgccagctggcgaaagggggatgtgctgcaaggcgattaagttgggtaacgccagggttttcccagtcacgacgttgtaaaacgacggccagtgccaagctttgtttaaaatataacaaaattgtgatcccacaaaatgaagtggggcaaaatcaaataattaactagtgtccgtaaacttgttggtcttcaactttttgaggaacacgttggacggcaaatcgtgactataacacaagttgatttaataattttagccaacacgtcgggctgcgtgttttttgcgctctgtgtacacgttgattaactggtcgattaaataatttaatttttggttcttctttaaatctgtgatgaaattttttaaaataactttaaattcttcattggtaaaaaatgccacgttttgcaacttgtgagggtctaatatgaggtcaaactcagtaggagttttatccaaaaaagaaaacatgattacgtctgtacacgaacgcgtattaacgcagagtgcaaagtataagagggttaaaaaatatattttacgcaccatatacgcatcgggttgatatcgttaatatggatcaatttgaacagttgattaacgtgtctctgctcaagtctttgatcaaaacgcaaatcgacgaaaatgtgtcggacaatatcaagtcgatgagcgaaaaactaaaaaggctagaatacgacaatctcacagacagcgttgagatatacggtattcacgacagcaggctgaataataaaaaaattagaaactattatttaaccctagaaagataatcatattgtgacgtacgttaaagataatcatgcgtaaaattgacgcatgtgttttatcggtctgtatatcgaggtttatttattaatttgaatagatattaagttttattatatttacacttacatactaataataaattcaacaaacaatttatttatgtttatttatttattaaaaaaaaacaaaaactcaaaatttcttctataaagtaacaaaacttttaaacattctctcttttacaaaaataaacttattttgtactttaaaaacagtcatgttgtattataaaataagtaattagcttaacttatacataatagaaacaaattatacttattagtcagtcagaaacaactttggcacatatcaatattatgctctcgacaaataacttttttgcattttttgcacgatgcatttgcctttcgccttattttagaggggcagtaagtacagtaagtacgttttttcattactggctcttcagtactgtcatctgatgtaccaggcacttcatttggcaaaatattagagatattatcgcgcaaatatctcttcaaagtaggagcttctaaacgcttacgcataaacgatgacgtcaggctcatgtaaaggtttctcataaattttttgcgactttgaaccttttctcccttgctactgacattatggctgtatataataaaagaatttatgcaggcaatgtttatcattccgtacaataatgccataggccacctattcgtcttcctactgcaggtcatcacagaacacatttggtctagcgtgtccactccgcctttagtttgattataatacataaccatttgcggtttaccggtactttcgttgatagaagcatcctcatcacaagatgataataagtataccatcttagctggcttcggtttatatgagacgagagtaaggggtccgtcaaaacaaaacatcgatgttcccactggcctggagcgactgtttttcagtacttccggtatctcgcgtttgtttgatcgcacggttcccacaatggttaattcgagctcgcccggggtttaaacacccgtactttaagttatcctgatttggaaaaaaattttaacatttgaagtttttattgtttagaaaattcaatggagtcgccccacatatgggacagggttggctttatctggtgcctgtcagtgtgtttaatacttttccatctattactgtcaagtataaactaaagtttatatagaccgttttcccattttcataaacaaatttggaagactgcaaaatcttattttgcttctccaagtttgtatgctcctttattaagcattcctttgtttcctttatgaatttcaactttagagacctgcagaacctgatagattgtggaaatcaattgttccatagtatatttccgctagaatcaatcattcgtaaaggagtttctgctgtggcgaatatactgccatcgacatcacacttctgtggacctgcaaatccctgtttgtagttcgaatgacctgagcttccatcgtatccataactaagtagaagttcggcgattaaaaatgttgtcccttgatctttccttattttctaaacaacttttttttgtaaagttaaaatccggccagctgtgtggttaagcaaacttagcaaaggcacttctgcttttgtgtcattcgttctttttgtttgcaacttcgtagtacgaggaaaaaggttgtttttcgtttgatctctaattgagatattttgttgcttggttaaattttgatcttaaagaacagctagtgcgtcgttaaatagtattttctccaatttcgcgaggggctgacttattaaggtgtgcatgctcttggctttttcagggcagatagcaaacagttttataatacatgccagatctgatttactgcccttacgcgcagccgcactagctgaatttattaataatttaatatttccagccgtggatttgatcaaattttaagctgctcttctctgagcccttgctctcgacaacaaataaggcaatgcggccgctttttgctcacctgtgattgctcctactcaaatacaaaaacatcaaattttctgtcaataaagcatatttatttatatttattttacaggaaagaattccttttaaagtgtattttaacctataatgaaaaacgattaaaaaaaatacataaaataattcgaaaatttttgaatagcccaggttgataaaaattcatttcatacgttttataacttatgcccctaagtattttttgaccatagtgtttcaattctacattaattttacagagtagaatgaaacgccacctactcagccaagaggcgaaaaggttagctcgccaagcagagagggcgccagtgctcactactttttataattctcaacttctttttccagactcagttcgtatatatagacctattttcaatttaacgtcggattgtcaactacttgccccgttttagagctagaaatagcaagttaaaataaggctagtccgttatcaacttgaaaaagtggcaccgagtcggtgcttttttgcctacctggagcctgagagttgttcaataaaataaaaatgtttcgtttttttgctttcgccagtatttattatttttcatcaatatgtattcaatttggtatgtatttagtaattgtaatatatagacaatggttttccgttgacgtacatacatctgacgtgtgtttatttagacataatagttatgttttcacatctttttaatgttcgcttaatgcgtatgcattaattaacatactcggtggcctccccaccaccaacttttttgcactgcaaaaaaacacgcttttgcacgcgggcccatacatagtacaaactctacgtttcgtagactattttacataaatagtctacaccgttgtatacgctccaaatacactaccacacattgaacctttttgcagtgcaaaaaagtacgtgtcggcagtcacgtaggccggccttatcgggtcgcgtcctgtcacgtacgaatcacattatcggaccggacgagtgttgtcttatcgtgacaggacgccagcttcctgtgttgctaaccgcagccggacgcaactccttatcggaacaggacgcgcctccatatcagccgcgcgttatctcatgcgcgtgaccggacacgaggcgcccgtcccgcttatcgcgcctataaatacagcccgcaacgatctggtaaacacagttgaacagcatctgttacagcgacacaacatgagccggtccaacaacgccaacgcgcccacgccatccaaccgccgccgcaacctgtctctggtggctagcatggtgagcaagggcgaggagctgttcaccggggtggtgcccatcctggtcgagctggacggcgacgtaaacggccacaagttcagcgtgtccggcgagggcgagggcgatgccacctacggcaagctgaccctgaagctgatctgcaccaccggcaagctgcccgtgccctggcccaccctcgtgaccaccctgggctacggcctgcagtgcttcgcccgctaccccgaccacatgaagcagcacgacttcttcaagtccgccatgcccgaaggctacgtccaggagcgcaccatcttcttcaaggacgacggcaactacaagacccgcgccgaggtgaagttcgagggcgacaccctggtgaaccgcatcgagctgaagggcatcgacttcaaggaggacggcaacatcctggggcacaagctggagtacaactacaacagccacaacgtctatatcaccgccgacaagcagaagaacggcatcaaggccaacttcaagatccgccacaacatcgaggacggcggcgtgcagctcgccgaccactaccagcagaacacccccatcggcgacggccccgtgctgctgcccgacaaccactacctgagctaccagtccaagctgagcaaagaccccaacgagaagcgcgatcacatggtcctgctggagttcgtgaccgccgccgggatcactctcggcatggacgagctgtacaagtaagcgctgactctagatcataatcagccataccacatttgtagaggttttacttgctttaaaaaacctcccacacctccccctgaacctgaaacataaaatgaatgcaattgttgttgttaacttgtttattgcagcttataatggttacaaataaagcaatagcatcacaaatttcacaaataaagcatttttttcactgcattctagttgtggtttgtccaaactcatcaatgtatcttaaagcttccttaagtttttgctcacctgtgattgctcctactcaaatacaaaaacatcaaattttctgtcaataaagcatatttatttatatttattttacaggaaagaattccttttaaagtgtattttaacctataatgaaaaacgattaaaaaaaatacataaaataattcgaaaatttttgaatagcccaggttgataaaaattcatttcatacgttttataacttatgcccctaagtattttttgaccatagtgtttcaattctacattaattttacagagtagaatgaaacgccacctactcagccaagaggcgaaaaggttagctcgccaagcagagagggcgccagtgctcactactttttataattctcaacttctttttccagactcagttcgtatatatagacctattttcaatttaacgtcgggcggcagcggcgggaatgggttttagagctagaaatagcaagttaaaataaggctagtccgttatcaacttgaaaaagtggcaccgagtcggtgcttttttgcctacctggagcctgagagttgttcaataaaataaaaatgtttcgtttttttgctttcgccagtatttattatttttcatcaatatgtattcaatttggtatgtatttagtaattgtaatatatagacaatggttttccgttgacgtacatacatctgacgtgtgtttatttagacataatagttatgttttcacatctttttaatgttcgcttaatgcgtatgcatctcgagcctatctatgcaaatctcagtgtgggatgtaagccaagttgagtactttttcttgaaatgattaaaatttcttttgcaatatgtctatttgcgggacaatctataacaaaaagtttcgctttgtttttttaaaacatcctcataagcatctgaaacagctattgaagctctaaatctgtcaaatattgcctgctgtttctcacgctttttctctccagaactccaagtctcaaacaattctgaattggccaacctgaggttgtgacctaaaaatgtatattttagtgttagtttttattgttaatttgtacacgtaaagcggcaattaaaagcactcaacacaaacaaatccaacttgtgacgaccacaaacatatagtacgaaccgctctctttcgatgccatgacaacttgtttgatataaacttagattggtgctttatttttaataattttaaacggactcttttttccgcagagtagctttcgtgcacccgtgataccgaacagctgttttaacagcctatatattttaacagatcgtgactcagataaaatttctgttacgtaacattgaagtttgattttaatattaacgactttcaaaaaatggatttttgcccacaaaacgtgatcagccagcctaaagtgcactcgctgcaaataggaccgcacgcgtaatgtattttagtattttctacgagttaaattaatttttgtatttgacgtttcgggatgtttttaaaaaaggtagttgttgttgcggcagtacccagtagccttccagcggctcgaaactgaacatttgatctcatcctgaaaagaaatattgctatgctcatttctaagaaaatgaccaacctccatcttgtgtcctgcttggcaagactttgcacctgttgcaccaaaagtacattattttcactacgcttgcttgaatagaattctcatcggcgcgcctttttgctcacctgtgattgctcctactcaaatacaaaaacatcaaattttctgtcaataaagcatatttatttatatttattttacaggaaagaattccttttaaagtgtattttaacctataatgaaaaacgattaaaaaaaatacataaaataattcgaaaatttttgaatagcccaggttgataaaaattcatttcatacgttttataacttatgcccctaagtattttttgaccatagtgtttcaattctacattaattttacagagtagaatgaaacgccacctactcagccaagaggcgaaaaggttagctcgccaagcagagagggcgccagtgctcactactttttataattctcaacttctttttccagactcagttcgtatatatagacctattttcaatttaacgtcgcttgagtgtgcaccagctgggttttagagctagaaatagcaagttaaaataaggctagtccgttatcaacttgaaaaagtggcaccgagtcggtgcttttttgcctacctggagcctgagagttgttcaataaaataaaaatgtttcgtttttttgctttcgccagtatttattatttttcatcaatatgtattcaatttggtatgtatttagtaattgtaatatatagacaatggttttccgttgacgtacatacatctgacgtgtgtttatttagacataatagttatgttttcacatctttttaatgttcgcttaatgcgtatgcatcctaggccggccgatctcggatctgacaatgttcagtgcagagactcggctacgcctcgtggactttgaagttgaccaacaatgtttattcttacctctaatagtcctctgtggcaaggtcaagattctgttagaagccaatgaagaacctggttgttcaataacattttgttcgtctaatatttcactaccgcttgacgttggctgcacttcatgtacctcatctataaacgcttcttctgtatcgctctggacgtcatcttcacttacgtgatctgatatttcactgtcagaatcctcaccaacaagctcgtcatcgctttgcagaagagcagagaggatatgctcatcgtctaaagaactacccattttattatatattagtcacgatatctataacaagaaaatatatatataataagttatcacgtaagtagaacatgaaataacaatataattatcgtatgagttaaatcttaaaagtcacgtaaaagataatcatgcgtcattttgactcacgcggtcgttatagttcaaaatcagtgacacttaccgcattgacaagcacgcctcacgggagctccaagcggcgactgagatgtcctaaatgcacagcgacggattcgcgctatttagaaagagagagcaatatttcaagaatgcatgcgtcaattttacgcagactatctttctagggttaaaaaagatttgcgctttactcgacctaaactttaaacacgtcatagaatcttcgtttgacaaaaaccacattgtggccaagctgtgtgacgcgacgcgcgctaaagaatggcaaaccaagtcgcgcgagcgtcgactctagaggatccccgggtaccgagctcgaattcgtaatcatggtcatagctgtttcctgtgtgaaattgttatccgctcacaattccacacaacatacgagccggaagcataaagtgtaaagcctggggtgcctaatgagtgagctaactcacattaattgcgttgcgctcactgcccgctttccagtcgggaaacctgtcgtgccagctgcattaatgaatcggccaacgcgcggggagaggcggtttgcgtattgggcgctcttccgcttcctcgctcactgactcgctgcgctcggtcgttcggctgcggcgagcggtatcagctcactcaaaggcggtaatacggt

SEQ ID NO: 11 - DNA, 10983 bp, Artificial Sequence
  pBac-Ds-HL-U63-sxln-gRNA-U63UTR-opie-mVenus-SV40-U63-sxlm-gRNA-U6 3UT-HR -U63-Btub3-UTR
tatccacagaatcaggggataacgcaggaaagaacatgtgagcaaaaggccagcaaaaggccaggaaccgtaaaaaggccgcgttgctggcgtttttccataggctccgcccccctgacgagcatcacaaaaatcgacgctcaagtcagaggtggcgaaacccgacaggactataaagataccaggcgtttccccctggaagctccctcgtgcgctctcctgttccgaccctgccgcttaccggatacctgtccgcctttctcccttcgggaagcgtggcgctttctcaatgctcacgctgtaggtatctcagttcggtgtaggtcgttcgctccaagctgggctgtgtgcacgaaccccccgttcagcccgaccgctgcgccttatccggtaactatcgtcttgagtccaacccggtaagacacgacttatcgccactggcagcagccactggtaacaggattagcagagcgaggtatgtaggcggtgctacagagttcttgaagtggtggcctaactacggctacactagaaggacagtatttggtatctgcgctctgctgaagccagttaccttcggaaaaagagttggtagctcttgatccggcaaacaaaccaccgctggtagcggtggtttttttgtttgcaagcagcagattacgcgcagaaaaaaaggatctcaagaagatcctttgatcttttctacggggtctgacgctcagtggaacgaaaactcacgttaagggattttggtcatgagattatcaaaaaggatcttcacctagatccttttaaattaaaaatgaagttttaaatcaatctaaagtatatatgagtaaacttggtctgacagttaccaatgcttaatcagtgaggcacctatctcagcgatctgtctatttcgttcatccatagttgcctgactccccgtcgtgtagataactacgatacgggagggcttaccatctggccccagtgctgcaatgataccgcgagacccacgctcaccggctccagatttatcagcaataaaccagccagccggaagggccgagcgcagaagtggtcctgcaactttatccgcctccatccagtctattaattgttgccgggaagctagagtaagtagttcgccagttaatagtttgcgcaacgttgttgccattgctacaggcatcgtggtgtcacgctcgtcgtttggtatggcttcattcagctccggttcccaacgatcaaggcgagttacatgatcccccatgttgtgcaaaaaagcggttagctccttcggtcctccgatcgttgtcagaagtaagttggccgcagtgttatcactcatggttatggcagcactgcataattctcttactgtcatgccatccgtaagatgcttttctgtgactggtgagtactcaaccaagtcattctgagaatagtgtatgcggcgaccgagttgctcttgcccggcgtcaatacgggataataccgcgccacatagcagaactttaaaagtgctcatcattggaaaacgttcttcggggcgaaaactctcaaggatcttaccgctgttgagatccagttcgatgtaacccactcgtgcacccaactgatcttcagcatcttttactttcaccagcgtttctgggtgagcaaaaacaggaaggcaaaatgccgcaaaaaagggaataagggcgacacggaaatgttgaatactcatactcttcctttttcaatattattgaagcatttatcagggttattgtctcatgagcggatacatatttgaatgtatttagaaaaataaacaaataggggttccgcgcacatttccccgaaaagtgccacctgacgtctaagaaaccattattatcatgacattaacctataaaaataggcgtatcacgaggccctttcgtctcgcgcgtttcggtgatgacggtgaaaacctctgacacatgcagctcccggagacggtcacagcttgtctgtaagcggatgccgggagcagacaagcccgtcagggcgcgtcagcgggtgttggcgggtgtcggggctggcttaactatgcggcatcagagcagattgtactgagagtgcaccatatgcggtgtgaaataccgcacagatgcgtaaggagaaaataccgcatcaggcgccattcgccattcaggctgcgcaactgttgggaagggcgatcggtgcgggcctcttcgctattacgccagctggcgaaagggggatgtgctgcaaggcgattaagttgggtaacgccagggttttcccagtcacgacgttgtaaaacgacggccagtgccaagctttgtttaaaatataacaaaattgtgatcccacaaaatgaagtggggcaaaatcaaataattaactagtgtccgtaaacttgttggtcttcaactttttgaggaacacgttggacggcaaatcgtgactataacacaagttgatttaataattttagccaacacgtcgggctgcgtgttttttgcgctctgtgtacacgttgattaactggtcgattaaataatttaatttttggttcttctttaaatctgtgatgaaattttttaaaataactttaaattcttcattggtaaaaaatgccacgttttgcaacttgtgagggtctaatatgaggtcaaactcagtaggagttttatccaaaaaagaaaacatgattacgtctgtacacgaacgcgtattaacgcagagtgcaaagtataagagggttaaaaaatatattttacgcaccatatacgcatcgggttgatatcgttaatatggatcaatttgaacagttgattaacgtgtctctgctcaagtctttgatcaaaacgcaaatcgacgaaaatgtgtcggacaatatcaagtcgatgagcgaaaaactaaaaaggctagaatacgacaatctcacagacagcgttgagatatacggtattcacgacagcaggctgaataataaaaaaattagaaactattatttaaccctagaaagataatcatattgtgacgtacgttaaagataatcatgcgtaaaattgacgcatgtgttttatcggtctgtatatcgaggtttatttattaatttgaatagatattaagttttattatatttacacttacatactaataataaattcaacaaacaatttatttatgtttatttatttattaaaaaaaaacaaaaactcaaaatttcttctataaagtaacaaaacttttaaacattctctcttttacaaaaataaacttattttgtactttaaaaacagtcatgttgtattataaaataagtaattagcttaacttatacataatagaaacaaattatacttattagtcagtcagaaacaactttggcacatatcaatattatgctctcgacaaataacttttttgcattttttgcacgatgcatttgcctttcgccttattttagaggggcagtaagtacagtaagtacgttttttcattactggctcttcagtactgtcatctgatgtaccaggcacttcatttggcaaaatattagagatattatcgcgcaaatatctcttcaaagtaggagcttctaaacgcttacgcataaacgatgacgtcaggctcatgtaaaggtttctcataaattttttgcgactttgaaccttttctcccttgctactgacattatggctgtatataataaaagaatttatgcaggcaatgtttatcattccgtacaataatgccataggccacctattcgtcttcctactgcaggtcatcacagaacacatttggtctagcgtgtccactccgcctttagtttgattataatacataaccatttgcggtttaccggtactttcgttgatagaagcatcctcatcacaagatgataataagtataccatcttagctggcttcggtttatatgagacgagagtaaggggtccgtcaaaacaaaacatcgatgttcccactggcctggagcgactgtttttcagtacttccggtatctcgcgtttgtttgatcgcacggttcccacaatggttaattcgagctcgcccggggtttaaacacccgtactttaagttatcctgatttggaaaaaaattttaacatttgaagtttttattgtttagaaaattcaatggagtcgccccacatatgggacagggttggctttatctggtgcctgtcagtgtgtttaatacttttccatctattactgtcaagtataaactaaagtttatatagaccgttttcccattttcataaacaaatttggaagactgcaaaatcttattttgcttctccaagtttgtatgctcctttattaagcattcctttgtttcctttatgaatttcaactttagagacctgcagaacctgatagattgtggaaatcaattgttccatagtatatttccgctagaatcaatcattcgtaaaggagtttctgctgtggcgaatatactgccatcgacatcacacttctgtggacctgcaaatccctgtttgtagttcgaatgacctgagcttccatcgtatccataactaagtagaagttcggcgattaaaaatgttgtcccttgatctttccttattttctaaacaacttttttttgtaaagttaaaatccggccagctgtgtggttaagcaaacttagcaaaggcacttctgcttttgtgtcattcgttctttttgtttgcaacttcgtagtacgaggaaaaaggttgtttttcgtttgatctctaattgagatattttgttgcttggttaaattttgatcttaaagaacagctagtgcgtcgttaaatagtattttctccaatttcgcgaggggctgacttattaaggtgtgcatgctcttggctttttcagggcagatagcaaacagttttataatacatgccagatctgatttactgcccttacgcgcagccgcactagctgaatttattaataatttaatatttccagccgtggatttgatcaaattttaagctgctcttctctgagcccttgctctcgacaacaaataaggcaatgcggccgctttttgctcacctgtgattgctcctactcaaatacaaaaacatcaaattttctgtcaataaagcatatttatttatatttattttacaggaaagaattccttttaaagtgtattttaacctataatgaaaaacgattaaaaaaaatacataaaataattcgaaaatttttgaatagcccaggttgataaaaattcatttcatacgttttataacttatgcccctaagtattttttgaccatagtgtttcaattctacattaattttacagagtagaatgaaacgccacctactcagccaagaggcgaaaaggttagctcgccaagcagagagggcgccagtgctcactactttttataattctcaacttctttttccagactcagttcgtatatatagacctattttcaatttaacgtcggattgtcaactacttgccccgttttagagctagaaatagcaagttaaaataaggctagtccgttatcaacttgaaaaagtggcaccgagtcggtgcttttttgcctacctggagcctgagagttgttcaataaaataaaaatgtttcgtttttttgctttcgccagtatttattatttttcatcaatatgtattcaatttggtatgtatttagtaattgtaatatatagacaatggttttccgttgacgtacatacatctgacgtgtgtttatttagacataatagttatgttttcacatctttttaatgttcgcttaatgcgtatgcattaattaacatactcggtggcctccccaccaccaacttttttgcactgcaaaaaaacacgcttttgcacgcgggcccatacatagtacaaactctacgtttcgtagactattttacataaatagtctacaccgttgtatacgctccaaatacactaccacacattgaacctttttgcagtgcaaaaaagtacgtgtcggcagtcacgtaggccggccttatcgggtcgcgtcctgtcacgtacgaatcacattatcggaccggacgagtgttgtcttatcgtgacaggacgccagcttcctgtgttgctaaccgcagccggacgcaactccttatcggaacaggacgcgcctccatatcagccgcgcgttatctcatgcgcgtgaccggacacgaggcgcccgtcccgcttatcgcgcctataaatacagcccgcaacgatctggtaaacacagttgaacagcatctgttacagcgacacaacatgagccggtccaacaacgccaacgcgcccacgccatccaaccgccgccgcaacctgtctctggtggctagcatggtgagcaagggcgaggagctgttcaccggggtggtgcccatcctggtcgagctggacggcgacgtaaacggccacaagttcagcgtgtccggcgagggcgagggcgatgccacctacggcaagctgaccctgaagctgatctgcaccaccggcaagctgcccgtgccctggcccaccctcgtgaccaccctgggctacggcctgcagtgcttcgcccgctaccccgaccacatgaagcagcacgacttcttcaagtccgccatgcccgaaggctacgtccaggagcgcaccatcttcttcaaggacgacggcaactacaagacccgcgccgaggtgaagttcgagggcgacaccctggtgaaccgcatcgagctgaagggcatcgacttcaaggaggacggcaacatcctggggcacaagctggagtacaactacaacagccacaacgtctatatcaccgccgacaagcagaagaacggcatcaaggccaacttcaagatccgccacaacatcgaggacggcggcgtgcagctcgccgaccactaccagcagaacacccccatcggcgacggccccgtgctgctgcccgacaaccactacctgagctaccagtccaagctgagcaaagaccccaacgagaagcgcgatcacatggtcctgctggagttcgtgaccgccgccgggatcactctcggcatggacgagctgtacaagtaagcgctgactctagatcataatcagccataccacatttgtagaggttttacttgctttaaaaaacctcccacacctccccctgaacctgaaacataaaatgaatgcaattgttgttgttaacttgtttattgcagcttataatggttacaaataaagcaatagcatcacaaatttcacaaataaagcatttttttcactgcattctagttgtggtttgtccaaactcatcaatgtatcttaaagcttccttaagtttttgctcacctgtgattgctcctactcaaatacaaaaacatcaaattttctgtcaataaagcatatttatttatatttattttacaggaaagaattccttttaaagtgtattttaacctataatgaaaaacgattaaaaaaaatacataaaataattcgaaaatttttgaatagcccaggttgataaaaattcatttcatacgttttataacttatgcccctaagtattttttgaccatagtgtttcaattctacattaattttacagagtagaatgaaacgccacctactcagccaagaggcgaaaaggttagctcgccaagcagagagggcgccagtgctcactactttttataattctcaacttctttttccagactcagttcgtatatatagacctattttcaatttaacgtcgggcggcagcggcgggaatgggttttagagctagaaatagcaagttaaaataaggctagtccgttatcaacttgaaaaagtggcaccgagtcggtgcttttttgcctacctggagcctgagagttgttcaataaaataaaaatgtttcgtttttttgctttcgccagtatttattatttttcatcaatatgtattcaatttggtatgtatttagtaattgtaatatatagacaatggttttccgttgacgtacatacatctgacgtgtgtttatttagacataatagttatgttttcacatctttttaatgttcgcttaatgcgtatgcatctcgagcctatctatgcaaatctcagtgtgggatgtaagccaagttgagtactttttcttgaaatgattaaaatttcttttgcaatatgtctatttgcgggacaatctataacaaaaagtttcgctttgtttttttaaaacatcctcataagcatctgaaacagctattgaagctctaaatctgtcaaatattgcctgctgtttctcacgctttttctctccagaactccaagtctcaaacaattctgaattggccaacctgaggttgtgacctaaaaatgtatattttagtgttagtttttattgttaatttgtacacgtaaagcggcaattaaaagcactcaacacaaacaaatccaacttgtgacgaccacaaacatatagtacgaaccgctctctttcgatgccatgacaacttgtttgatataaacttagattggtgctttatttttaataattttaaacggactcttttttccgcagagtagctttcgtgcacccgtgataccgaacagctgttttaacagcctatatattttaacagatcgtgactcagataaaatttctgttacgtaacattgaagtttgattttaatattaacgactttcaaaaaatggatttttgcccacaaaacgtgatcagccagcctaaagtgcactcgctgcaaataggaccgcacgcgtaatgtattttagtattttctacgagttaaattaatttttgtatttgacgtttcgggatgtttttaaaaaaggtagttgttgttgcggcagtacccagtagccttccagcggctcgaaactgaacatttgatctcatcctgaaaagaaatattgctatgctcatttctaagaaaatgaccaacctccatcttgtgtcctgcttggcaagactttgcacctgttgcaccaaaagtacattattttcactacgcttgcttgaatagaattctcatcggcgcgcctttttgctcacctgtgattgctcctactcaaatacaaaaacatcaaattttctgtcaataaagcatatttatttatatttattttacaggaaagaattccttttaaagtgtattttaacctataatgaaaaacgattaaaaaaaatacataaaataattcgaaaatttttgaatagcccaggttgataaaaattcatttcatacgttttataacttatgcccctaagtattttttgaccatagtgtttcaattctacattaattttacagagtagaatgaaacgccacctactcagccaagaggcgaaaaggttagctcgccaagcagagagggcgccagtgctcactactttttataattctcaacttctttttccagactcagttcgtatatatagacctattttcaatttaacgtcgcaatgcggtaaccagatcgggttttagagctagaaatagcaagttaaaataaggctagtccgttatcaacttgaaaaagtggcaccgagtcggtgcttttttgcctacctggagcctgagagttgttcaataaaataaaaatgtttcgtttttttgctttcgccagtatttattatttttcatcaatatgtattcaatttggtatgtatttagtaattgtaatatatagacaatggttttccgttgacgtacatacatctgacgtgtgtttatttagacataatagttatgttttcacatctttttaatgttcgcttaatgcgtatgcatcctaggccggccgatctcggatctgacaatgttcagtgcagagactcggctacgcctcgtggactttgaagttgaccaacaatgtttattcttacctctaatagtcctctgtggcaaggtcaagattctgttagaagccaatgaagaacctggttgttcaataacattttgttcgtctaatatttcactaccgcttgacgttggctgcacttcatgtacctcatctataaacgcttcttctgtatcgctctggacgtcatcttcacttacgtgatctgatatttcactgtcagaatcctcaccaacaagctcgtcatcgctttgcagaagagcagagaggatatgctcatcgtctaaagaactacccattttattatatattagtcacgatatctataacaagaaaatatatatataataagttatcacgtaagtagaacatgaaataacaatataattatcgtatgagttaaatcttaaaagtcacgtaaaagataatcatgcgtcattttgactcacgcggtcgttatagttcaaaatcagtgacacttaccgcattgacaagcacgcctcacgggagctccaagcggcgactgagatgtcctaaatgcacagcgacggattcgcgctatttagaaagagagagcaatatttcaagaatgcatgcgtcaattttacgcagactatctttctagggttaaaaaagatttgcgctttactcgacctaaactttaaacacgtcatagaatcttcgtttgacaaaaaccacattgtggccaagctgtgtgacgcgacgcgcgctaaagaatggcaaaccaagtcgcgcgagcgtcgactctagaggatccccgggtaccgagctcgaattcgtaatcatggtcatagctgtttcctgtgtgaaattgttatccgctcacaattccacacaacatacgagccggaagcataaagtgtaaagcctggggtgcctaatgagtgagctaactcacattaattgcgttgcgctcactgcccgctttccagtcgggaaacctgtcgtgccagctgcattaatgaatcggccaacgcgcggggagaggcggtttgcgtattgggcgctcttccgcttcctcgctcactgactcgctgcgctcggtcgttcggctgcggcgagcggtatcagctcactcaaaggcggtaatacggt

SEQ ID NO: 12 - DNA, 10983 bp, Artificial Sequence
  pBac-Ds-HL-U63-sxln-gRNA-U63UTR-opie-mVenus-SV40-U63-sxlm-gRNA-U6 3UT-HR -U63-Btub1-UTR
tatccacagaatcaggggataacgcaggaaagaacatgtgagcaaaaggccagcaaaaggccaggaaccgtaaaaaggccgcgttgctggcgtttttccataggctccgcccccctgacgagcatcacaaaaatcgacgctcaagtcagaggtggcgaaacccgacaggactataaagataccaggcgtttccccctggaagctccctcgtgcgctctcctgttccgaccctgccgcttaccggatacctgtccgcctttctcccttcgggaagcgtggcgctttctcaatgctcacgctgtaggtatctcagttcggtgtaggtcgttcgctccaagctgggctgtgtgcacgaaccccccgttcagcccgaccgctgcgccttatccggtaactatcgtcttgagtccaacccggtaagacacgacttatcgccactggcagcagccactggtaacaggattagcagagcgaggtatgtaggcggtgctacagagttcttgaagtggtggcctaactacggctacactagaaggacagtatttggtatctgcgctctgctgaagccagttaccttcggaaaaagagttggtagctcttgatccggcaaacaaaccaccgctggtagcggtggtttttttgtttgcaagcagcagattacgcgcagaaaaaaaggatctcaagaagatcctttgatcttttctacggggtctgacgctcagtggaacgaaaactcacgttaagggattttggtcatgagattatcaaaaaggatcttcacctagatccttttaaattaaaaatgaagttttaaatcaatctaaagtatatatgagtaaacttggtctgacagttaccaatgcttaatcagtgaggcacctatctcagcgatctgtctatttcgttcatccatagttgcctgactccccgtcgtgtagataactacgatacgggagggcttaccatctggccccagtgctgcaatgataccgcgagacccacgctcaccggctccagatttatcagcaataaaccagccagccggaagggccgagcgcagaagtggtcctgcaactttatccgcctccatccagtctattaattgttgccgggaagctagagtaagtagttcgccagttaatagtttgcgcaacgttgttgccattgctacaggcatcgtggtgtcacgctcgtcgtttggtatggcttcattcagctccggttcccaacgatcaaggcgagttacatgatcccccatgttgtgcaaaaaagcggttagctccttcggtcctccgatcgttgtcagaagtaagttggccgcagtgttatcactcatggttatggcagcactgcataattctcttactgtcatgccatccgtaagatgcttttctgtgactggtgagtactcaaccaagtcattctgagaatagtgtatgcggcgaccgagttgctcttgcccggcgtcaatacgggataataccgcgccacatagcagaactttaaaagtgctcatcattggaaaacgttcttcggggcgaaaactctcaaggatcttaccgctgttgagatccagttcgatgtaacccactcgtgcacccaactgatcttcagcatcttttactttcaccagcgtttctgggtgagcaaaaacaggaaggcaaaatgccgcaaaaaagggaataagggcgacacggaaatgttgaatactcatactcttcctttttcaatattattgaagcatttatcagggttattgtctcatgagcggatacatatttgaatgtatttagaaaaataaacaaataggggttccgcgcacatttccccgaaaagtgccacctgacgtctaagaaaccattattatcatgacattaacctataaaaataggcgtatcacgaggccctttcgtctcgcgcgtttcggtgatgacggtgaaaacctctgacacatgcagctcccggagacggtcacagcttgtctgtaagcggatgccgggagcagacaagcccgtcagggcgcgtcagcgggtgttggcgggtgtcggggctggcttaactatgcggcatcagagcagattgtactgagagtgcaccatatgcggtgtgaaataccgcacagatgcgtaaggagaaaataccgcatcaggcgccattcgccattcaggctgcgcaactgttgggaagggcgatcggtgcgggcctcttcgctattacgccagctggcgaaagggggatgtgctgcaaggcgattaagttgggtaacgccagggttttcccagtcacgacgttgtaaaacgacggccagtgccaagctttgtttaaaatataacaaaattgtgatcccacaaaatgaagtggggcaaaatcaaataattaactagtgtccgtaaacttgttggtcttcaactttttgaggaacacgttggacggcaaatcgtgactataacacaagttgatttaataattttagccaacacgtcgggctgcgtgttttttgcgctctgtgtacacgttgattaactggtcgattaaataatttaatttttggttcttctttaaatctgtgatgaaattttttaaaataactttaaattcttcattggtaaaaaatgccacgttttgcaacttgtgagggtctaatatgaggtcaaactcagtaggagttttatccaaaaaagaaaacatgattacgtctgtacacgaacgcgtattaacgcagagtgcaaagtataagagggttaaaaaatatattttacgcaccatatacgcatcgggttgatatcgttaatatggatcaatttgaacagttgattaacgtgtctctgctcaagtctttgatcaaaacgcaaatcgacgaaaatgtgtcggacaatatcaagtcgatgagcgaaaaactaaaaaggctagaatacgacaatctcacagacagcgttgagatatacggtattcacgacagcaggctgaataataaaaaaattagaaactattatttaaccctagaaagataatcatattgtgacgtacgttaaagataatcatgcgtaaaattgacgcatgtgttttatcggtctgtatatcgaggtttatttattaatttgaatagatattaagttttattatatttacacttacatactaataataaattcaacaaacaatttatttatgtttatttatttattaaaaaaaaacaaaaactcaaaatttcttctataaagtaacaaaacttttaaacattctctcttttacaaaaataaacttattttgtactttaaaaacagtcatgttgtattataaaataagtaattagcttaacttatacataatagaaacaaattatacttattagtcagtcagaaacaactttggcacatatcaatattatgctctcgacaaataacttttttgcattttttgcacgatgcatttgcctttcgccttattttagaggggcagtaagtacagtaagtacgttttttcattactggctcttcagtactgtcatctgatgtaccaggcacttcatttggcaaaatattagagatattatcgcgcaaatatctcttcaaagtaggagcttctaaacgcttacgcataaacgatgacgtcaggctcatgtaaaggtttctcataaattttttgcgactttgaaccttttctcccttgctactgacattatggctgtatataataaaagaatttatgcaggcaatgtttatcattccgtacaataatgccataggccacctattcgtcttcctactgcaggtcatcacagaacacatttggtctagcgtgtccactccgcctttagtttgattataatacataaccatttgcggtttaccggtactttcgttgatagaagcatcctcatcacaagatgataataagtataccatcttagctggcttcggtttatatgagacgagagtaaggggtccgtcaaaacaaaacatcgatgttcccactggcctggagcgactgtttttcagtacttccggtatctcgcgtttgtttgatcgcacggttcccacaatggttaattcgagctcgcccggggtttaaacacccgtactttaagttatcctgatttggaaaaaaattttaacatttgaagtttttattgtttagaaaattcaatggagtcgccccacatatgggacagggttggctttatctggtgcctgtcagtgtgtttaatacttttccatctattactgtcaagtataaactaaagtttatatagaccgttttcccattttcataaacaaatttggaagactgcaaaatcttattttgcttctccaagtttgtatgctcctttattaagcattcctttgtttcctttatgaatttcaactttagagacctgcagaacctgatagattgtggaaatcaattgttccatagtatatttccgctagaatcaatcattcgtaaaggagtttctgctgtggcgaatatactgccatcgacatcacacttctgtggacctgcaaatccctgtttgtagttcgaatgacctgagcttccatcgtatccataactaagtagaagttcggcgattaaaaatgttgtcccttgatctttccttattttctaaacaacttttttttgtaaagttaaaatccggccagctgtgtggttaagcaaacttagcaaaggcacttctgcttttgtgtcattcgttctttttgtttgcaacttcgtagtacgaggaaaaaggttgtttttcgtttgatctctaattgagatattttgttgcttggttaaattttgatcttaaagaacagctagtgcgtcgttaaatagtattttctccaatttcgcgaggggctgacttattaaggtgtgcatgctcttggctttttcagggcagatagcaaacagttttataatacatgccagatctgatttactgcccttacgcgcagccgcactagctgaatttattaataatttaatatttccagccgtggatttgatcaaattttaagctgctcttctctgagcccttgctctcgacaacaaataaggcaatgcggccgctttttgctcacctgtgattgctcctactcaaatacaaaaacatcaaattttctgtcaataaagcatatttatttatatttattttacaggaaagaattccttttaaagtgtattttaacctataatgaaaaacgattaaaaaaaatacataaaataattcgaaaatttttgaatagcccaggttgataaaaattcatttcatacgttttataacttatgcccctaagtattttttgaccatagtgtttcaattctacattaattttacagagtagaatgaaacgccacctactcagccaagaggcgaaaaggttagctcgccaagcagagagggcgccagtgctcactactttttataattctcaacttctttttccagactcagttcgtatatatagacctattttcaatttaacgtcggattgtcaactacttgccccgttttagagctagaaatagcaagttaaaataaggctagtccgttatcaacttgaaaaagtggcaccgagtcggtgcttttttgcctacctggagcctgagagttgttcaataaaataaaaatgtttcgtttttttgctttcgccagtatttattatttttcatcaatatgtattcaatttggtatgtatttagtaattgtaatatatagacaatggttttccgttgacgtacatacatctgacgtgtgtttatttagacataatagttatgttttcacatctttttaatgttcgcttaatgcgtatgcattaattaacatactcggtggcctccccaccaccaacttttttgcactgcaaaaaaacacgcttttgcacgcgggcccatacatagtacaaactctacgtttcgtagactattttacataaatagtctacaccgttgtatacgctccaaatacactaccacacattgaacctttttgcagtgcaaaaaagtacgtgtcggcagtcacgtaggccggccttatcgggtcgcgtcctgtcacgtacgaatcacattatcggaccggacgagtgttgtcttatcgtgacaggacgccagcttcctgtgttgctaaccgcagccggacgcaactccttatcggaacaggacgcgcctccatatcagccgcgcgttatctcatgcgcgtgaccggacacgaggcgcccgtcccgcttatcgcgcctataaatacagcccgcaacgatctggtaaacacagttgaacagcatctgttacagcgacacaacatgagccggtccaacaacgccaacgcgcccacgccatccaaccgccgccgcaacctgtctctggtggctagcatggtgagcaagggcgaggagctgttcaccggggtggtgcccatcctggtcgagctggacggcgacgtaaacggccacaagttcagcgtgtccggcgagggcgagggcgatgccacctacggcaagctgaccctgaagctgatctgcaccaccggcaagctgcccgtgccctggcccaccctcgtgaccaccctgggctacggcctgcagtgcttcgcccgctaccccgaccacatgaagcagcacgacttcttcaagtccgccatgcccgaaggctacgtccaggagcgcaccatcttcttcaaggacgacggcaactacaagacccgcgccgaggtgaagttcgagggcgacaccctggtgaaccgcatcgagctgaagggcatcgacttcaaggaggacggcaacatcctggggcacaagctggagtacaactacaacagccacaacgtctatatcaccgccgacaagcagaagaacggcatcaaggccaacttcaagatccgccacaacatcgaggacggcggcgtgcagctcgccgaccactaccagcagaacacccccatcggcgacggccccgtgctgctgcccgacaaccactacctgagctaccagtccaagctgagcaaagaccccaacgagaagcgcgatcacatggtcctgctggagttcgtgaccgccgccgggatcactctcggcatggacgagctgtacaagtaagcgctgactctagatcataatcagccataccacatttgtagaggttttacttgctttaaaaaacctcccacacctccccctgaacctgaaacataaaatgaatgcaattgttgttgttaacttgtttattgcagcttataatggttacaaataaagcaatagcatcacaaatttcacaaataaagcatttttttcactgcattctagttgtggtttgtccaaactcatcaatgtatcttaaagcttccttaagtttttgctcacctgtgattgctcctactcaaatacaaaaacatcaaattttctgtcaataaagcatatttatttatatttattttacaggaaagaattccttttaaagtgtattttaacctataatgaaaaacgattaaaaaaaatacataaaataattcgaaaatttttgaatagcccaggttgataaaaattcatttcatacgttttataacttatgcccctaagtattttttgaccatagtgtttcaattctacattaattttacagagtagaatgaaacgccacctactcagccaagaggcgaaaaggttagctcgccaagcagagagggcgccagtgctcactactttttataattctcaacttctttttccagactcagttcgtatatatagacctattttcaatttaacgtcgggcggcagcggcgggaatgggttttagagctagaaatagcaagttaaaataaggctagtccgttatcaacttgaaaaagtggcaccgagtcggtgcttttttgcctacctggagcctgagagttgttcaataaaataaaaatgtttcgtttttttgctttcgccagtatttattatttttcatcaatatgtattcaatttggtatgtatttagtaattgtaatatatagacaatggttttccgttgacgtacatacatctgacgtgtgtttatttagacataatagttatgttttcacatctttttaatgttcgcttaatgcgtatgcatctcgagcctatctatgcaaatctcagtgtgggatgtaagccaagttgagtactttttcttgaaatgattaaaatttcttttgcaatatgtctatttgcgggacaatctataacaaaaagtttcgctttgtttttttaaaacatcctcataagcatctgaaacagctattgaagctctaaatctgtcaaatattgcctgctgtttctcacgctttttctctccagaactccaagtctcaaacaattctgaattggccaacctgaggttgtgacctaaaaatgtatattttagtgttagtttttattgttaatttgtacacgtaaagcggcaattaaaagcactcaacacaaacaaatccaacttgtgacgaccacaaacatatagtacgaaccgctctctttcgatgccatgacaacttgtttgatataaacttagattggtgctttatttttaataattttaaacggactcttttttccgcagagtagctttcgtgcacccgtgataccgaacagctgttttaacagcctatatattttaacagatcgtgactcagataaaatttctgttacgtaacattgaagtttgattttaatattaacgactttcaaaaaatggatttttgcccacaaaacgtgatcagccagcctaaagtgcactcgctgcaaataggaccgcacgcgtaatgtattttagtattttctacgagttaaattaatttttgtatttgacgtttcgggatgtttttaaaaaaggtagttgttgttgcggcagtacccagtagccttccagcggctcgaaactgaacatttgatctcatcctgaaaagaaatattgctatgctcatttctaagaaaatgaccaacctccatcttgtgtcctgcttggcaagactttgcacctgttgcaccaaaagtacattattttcactacgcttgcttgaatagaattctcatcggcgcgcctttttgctcacctgtgattgctcctactcaaatacaaaaacatcaaattttctgtcaataaagcatatttatttatatttattttacaggaaagaattccttttaaagtgtattttaacctataatgaaaaacgattaaaaaaaatacataaaataattcgaaaatttttgaatagcccaggttgataaaaattcatttcatacgttttataacttatgcccctaagtattttttgaccatagtgtttcaattctacattaattttacagagtagaatgaaacgccacctactcagccaagaggcgaaaaggttagctcgccaagcagagagggcgccagtgctcactactttttataattctcaacttctttttccagactcagttcgtatatatagacctattttcaatttaacgtcggcctcggggtctaaagatgtgttttagagctagaaatagcaagttaaaataaggctagtccgttatcaacttgaaaaagtggcaccgagtcggtgcttttttgcctacctggagcctgagagttgttcaataaaataaaaatgtttcgtttttttgctttcgccagtatttattatttttcatcaatatgtattcaatttggtatgtatttagtaattgtaatatatagacaatggttttccgttgacgtacatacatctgacgtgtgtttatttagacataatagttatgttttcacatctttttaatgttcgcttaatgcgtatgcatcctaggccggccgatctcggatctgacaatgttcagtgcagagactcggctacgcctcgtggactttgaagttgaccaacaatgtttattcttacctctaatagtcctctgtggcaaggtcaagattctgttagaagccaatgaagaacctggttgttcaataacattttgttcgtctaatatttcactaccgcttgacgttggctgcacttcatgtacctcatctataaacgcttcttctgtatcgctctggacgtcatcttcacttacgtgatctgatatttcactgtcagaatcctcaccaacaagctcgtcatcgctttgcagaagagcagagaggatatgctcatcgtctaaagaactacccattttattatatattagtcacgatatctataacaagaaaatatatatataataagttatcacgtaagtagaacatgaaataacaatataattatcgtatgagttaaatcttaaaagtcacgtaaaagataatcatgcgtcattttgactcacgcggtcgttatagttcaaaatcagtgacacttaccgcattgacaagcacgcctcacgggagctccaagcggcgactgagatgtcctaaatgcacagcgacggattcgcgctatttagaaagagagagcaatatttcaagaatgcatgcgtcaattttacgcagactatctttctagggttaaaaaagatttgcgctttactcgacctaaactttaaacacgtcatagaatcttcgtttgacaaaaaccacattgtggccaagctgtgtgacgcgacgcgcgctaaagaatggcaaaccaagtcgcgcgagcgtcgactctagaggatccccgggtaccgagctcgaattcgtaatcatggtcatagctgtttcctgtgtgaaattgttatccgctcacaattccacacaacatacgagccggaagcataaagtgtaaagcctggggtgcctaatgagtgagctaactcacattaattgcgttgcgctcactgcccgctttccagtcgggaaacctgtcgtgccagctgcattaatgaatcggccaacgcgcggggagaggcggtttgcgtattgggcgctcttccgcttcctcgctcactgactcgctgcgctcggtcgttcggctgcggcgagcggtatcagctcactcaaaggcggtaatacggt

SEQ ID NO: 13 - DNA, 9851 bp, Artificial Sequence
  pBac-[U6-gRNA-Slx]-[U6-gRNA#2]-[Opie2-eGFP-p10]-[U6-gRNA#1-Can]
tatccacagaatcaggggataacgcaggaaagaacatgtgagcaaaaggccagcaaaaggccaggaaccgtaaaaaggccgcgttgctggcgtttttccataggctccgcccccctgacgagcatcacaaaaatcgacgctcaagtcagaggtggcgaaacccgacaggactataaagataccaggcgtttccccctggaagctccctcgtgcgctctcctgttccgaccctgccgcttaccggatacctgtccgcctttctcccttcgggaagcgtggcgctttctcaatgctcacgctgtaggtatctcagttcggtgtaggtcgttcgctccaagctgggctgtgtgcacgaaccccccgttcagcccgaccgctgcgccttatccggtaactatcgtcttgagtccaacccggtaagacacgacttatcgccactggcagcagccactggtaacaggattagcagagcgaggtatgtaggcggtgctacagagttcttgaagtggtggcctaactacggctacactagaaggacagtatttggtatctgcgctctgctgaagccagttaccttcggaaaaagagttggtagctcttgatccggcaaacaaaccaccgctggtagcggtggtttttttgtttgcaagcagcagattacgcgcagaaaaaaaggatctcaagaagatcctttgatcttttctacggggtctgacgctcagtggaacgaaaactcacgttaagggattttggtcatgagattatcaaaaaggatcttcacctagatccttttaaattaaaaatgaagttttaaatcaatctaaagtatatatgagtaaacttggtctgacagttaccaatgcttaatcagtgaggcacctatctcagcgatctgtctatttcgttcatccatagttgcctgactccccgtcgtgtagataactacgatacgggagggcttaccatctggccccagtgctgcaatgataccgcgagacccacgctcaccggctccagatttatcagcaataaaccagccagccggaagggccgagcgcagaagtggtcctgcaactttatccgcctccatccagtctattaattgttgccgggaagctagagtaagtagttcgccagttaatagtttgcgcaacgttgttgccattgctacaggcatcgtggtgtcacgctcgtcgtttggtatggcttcattcagctccggttcccaacgatcaaggcgagttacatgatcccccatgttgtgcaaaaaagcggttagctccttcggtcctccgatcgttgtcagaagtaagttggccgcagtgttatcactcatggttatggcagcactgcataattctcttactgtcatgccatccgtaagatgcttttctgtgactggtgagtactcaaccaagtcattctgagaatagtgtatgcggcgaccgagttgctcttgcccggcgtcaatacgggataataccgcgccacatagcagaactttaaaagtgctcatcattggaaaacgttcttcggggcgaaaactctcaaggatcttaccgctgttgagatccagttcgatgtaacccactcgtgcacccaactgatcttcagcatcttttactttcaccagcgtttctgggtgagcaaaaacaggaaggcaaaatgccgcaaaaaagggaataagggcgacacggaaatgttgaatactcatactcttcctttttcaatattattgaagcatttatcagggttattgtctcatgagcggatacatatttgaatgtatttagaaaaataaacaaataggggttccgcgcacatttccccgaaaagtgccacctgacgtctaagaaaccattattatcatgacattaacctataaaaataggcgtatcacgaggccctttcgtctcgcgcgtttcggtgatgacggtgaaaacctctgacacatgcagctcccggagacggtcacagcttgtctgtaagcggatgccgggagcagacaagcccgtcagggcgcgtcagcgggtgttggcgggtgtcggggctggcttaactatgcggcatcagagcagattgtactgagagtgcaccatatgcggtgtgaaataccgcacagatgcgtaaggagaaaataccgcatcaggcgccattcgccattcaggctgcgcaactgttgggaagggcgatcggtgcgggcctcttcgctattacgccagctggcgaaagggggatgtgctgcaaggcgattaagttgggtaacgccagggttttcccagtcacgacgttgtaaaacgacggccagtgccaagctttgtttaaaatataacaaaattgtgatcccacaaaatgaagtggggcaaaatcaaataattaactagtgtccgtaaacttgttggtcttcaactttttgaggaacacgttggacggcaaatcgtgactataacacaagttgatttaataattttagccaacacgtcgggctgcgtgttttttgcgctctgtgtacacgttgattaactggtcgattaaataatttaatttttggttcttctttaaatctgtgatgaaattttttaaaataactttaaattcttcattggtaaaaaatgccacgttttgcaacttgtgagggtctaatatgaggtcaaactcagtaggagttttatccaaaaaagaaaacatgattacgtctgtacacgaacgcgtattaacgcagagtgcaaagtataagagggttaaaaaatatattttacgcaccatatacgcatcgggttgatatcgttaatatggatcaatttgaacagttgattaacgtgtctctgctcaagtctttgatcaaaacgcaaatcgacgaaaatgtgtcggacaatatcaagtcgatgagcgaaaaactaaaaaggctagaatacgacaatctcacagacagcgttgagatatacggtattcacgacagcaggctgaataataaaaaaattagaaactattatttaaccctagaaagataatcatattgtgacgtacgttaaagataatcatgcgtaaaattgacgcatgtgttttatcggtctgtatatcgaggtttatttattaatttgaatagatattaagttttattatatttacacttacatactaataataaattcaacaaacaatttatttatgtttatttatttattaaaaaaaaacaaaaactcaaaatttcttctataaagtaacaaaacttttaaacattctctcttttacaaaaataaacttattttgtactttaaaaacagtcatgttgtattataaaataagtaattagcttaacttatacataatagaaacaaattatacttattagtcagtcagaaacaactttggcacatatcaatattatgctctcgacaaataacttttttgcattttttgcacgatgcatttgcctttcgccttattttagaggggcagtaagtacagtaagtacgttttttcattactggctcttcagtactgtcatctgatgtaccaggcacttcatttggcaaaatattagagatattatcgcgcaaatatctcttcaaagtaggagcttctaaacgcttacgcataaacgatgacgtcaggctcatgtaaaggtttctcataaattttttgcgactttgaaccttttctcccttgctactgacattatggctgtatataataaaagaatttatgcaggcaatgtttatcattccgtacaataatgccataggccacctattcgtcttcctactgcaggtcatcacagaacacatttggtctagcgtgtccactccgcctttagtttgattataatacataaccatttgcggtttaccggtactttcgttgatagaagcatcctcatcacaagatgataataagtataccatcttagctggcttcggtttatatgagacgagagtaaggggtccgtcaaaacaaaacatcgatgttcccactggcctggagcgactgtttttcagtacttccggtatctcgcgtttgtttgatcgcacggttcccacaatggttaattcgagctcgcccggggtcctaggtttttgctcacctgtgattgctcctactcaaatacaaaaacatcaaattttctgtcaataaagcatatttatttatatttattttacaggaaagaattccttttaaagtgtattttaacctataatgaaaaacgattaaaaaaaatacataaaataattcgaaaatttttgaatagcccaggttgataaaaattcatttcatacgttttataacttatgcccctaagtattttttgaccatagtgtttcaattctacattaattttacagagtagaatgaaacgccacctactcagccaagaggcgaaaaggttagctcgccaagcagagagggcgccagtgctcactactttttataattctcaacttctttttccagactcagttcgtatatatagacctattttcaatttaacgtcgggcggcagcggcgggaatgggttttagagctagaaatagcaagttaaaataaggctagtccgttatcaacttgaaaaagtggcaccgagtcggtgcttttttttttgcctacctggagcctgagagttgttcaataaaataaaaatgtttcgtttttttgctttcgccagtatttattatttttcatcaatatgtattcaatttggtatgtatttagtaattgtaatatatagacaatggttttccgttgacgtacatacatctgacgtgtgtttatttagacataatagttatgttttcacatctttttaatgttcgcttaatgcgtatgcattctagacaattgtgctcggcaacagtatatttgtggtgtgccaaccaacaacctgcaggagctccagcttttgtgggcctccgttgtatgttgtagcgtctgtgaagcgtcctactcctaagcatgacttgaagcacaacttacctaagccatgacagcctcctgtcgtgtatcactgacagctcgactctctacgatatctaagctgatgctagcgaattcttttttgctcacctgtgattgctcctactcaaatacaaaaacatcaaattttctgtcaataaagcatatttatttatatttattttacaggaaagaattccttttaaagtgtattttaacctataatgaaaaacgattaaaaaaaatacataaaataattcgaaaatttttgaatagcccaggttgataaaaattcatttcatacgttttataacttatgcccctaagtattttttgaccatagtgtttcaattctacattaattttacagagtagaatgaaacgccacctactcagccaagaggcgaaaaggttagctcgccaagcagagagggcgccagtgctcactactttttataattctcaacttctttttccagactcagttcgtatatatagacctattttcaatttaacgtcggctacagaggaatggcccaggttttagagctagaaatagcaagttaaaataaggctagtccgttatcaacttgaaaaagtggcaccgagtcggtgcttttttttttgcctacctggagcctgagagttgttcaataaaataaaaatgtttcgtttttttgctttcgccagtatttattatttttcatcaatatgtattcaatttggtatgtatttagtaattgtaatatatagacaatggttttccgttgacgtacatacatctgacgtgtgtttatttagacataatagttatgttttcacatctttttaatgttcgcttaatgcgtatgcattctagacaattgtgctcggcaacagtatatttgtggtgtgccaaccaacaacctgcaggagctccagcttttgtcttaagcatactcggtggcctccccaccaccaacttttttgcactgcaaaaaaacacgcttttgcacgcgggcccatacatagtacaaactctacgtttcgtagactattttacataaatagtctacaccgttgtatacgctccaaatacactaccacacattgaacctttttgcagtgcaaaaaagtacgtgtcggcagtcacgtaggccggccttatcgggtcgcgtcctgtcacgtacgaatcacattatcggaccggacgagtgttgtcttatcgtgacaggacgccagcttcctgtgttgctaaccgcagccggacgcaactccttatcggaacaggacgcgcctccatatcagccgcgcgttatctcatgcgcgtgaccggacacgaggcgcccgtcccgcttatcgcgcctataaatacagcccgcaacgatctggtaaacacagttgaacagcatctgttacagcgacacaacatgagccggtccaacaacgccaacgcgcccacgccatccaaccgccgccgcaacctgtctctggtgcaaaatgagcaagggcgaggagctgttcaccggggtggtgcccatcctggtcgagctggacggcgacgtaaacggccacaagttcagcgtgtccggcgagggcgagggcgatgccacctacggcaagctgaccctgaagttcatctgcaccaccggcaagctgcccgtgccctggcccaccctcgtgaccaccctgacctacggcgtgcagtgcttcagccgctaccccgaccacatgaagcagcacgacttcttcaagtccgccatgcccgaaggctacgtccaggagcgcaccatcttcttcaaggacgacggcaactacaagacccgcgccgaggtgaagttcgagggcgacaccctggtgaaccgcatcgagctgaagggcatcgacttcaaggaggacggcaacatcctggggcacaagctggagtacaactacaacagccacaacgtctatatcatggccgacaagcagaagaacggcatcaaggtgaacttcaagatccgccacaacatcgaggacggcagcgtgcagctcgccgaccactaccagcagaacacccccatcggcgacggccccgtgctgctgcccgacaaccactacctgagcacccagtccgccctgagcaaagaccccaacgagaagcgcgatcacatggtcctgctggagttcgtgaccgccgccgggatcactctcggcatggacgagctgtacaagtaagcggccgctagaatgaatcgtttttaaaataacaaatcaattgttttataatattcgtacgattctttgattatgtaataaaatgtgatcattaggaagattacgaaaaatataaaaaatatgagttctgtgtgtataacaaatgctgtaaacgccacaattgtgtttgttgcaaataaacccatgattatttgattaaaattgttgttttctttgttcatagacaatagtgtgttttgcctaaacgtgtactgcataaactccatgcgagtgtatagcgagctagtggctaacgcttgccccaccaaagtagattcgtcaaaatcctcaatttcatcaccctcctccaagtttaacatttggccgtcggaattaacttctaaagatgccacataatctaataaatgaaatagagattcaaacgtggcgtcatcgtccgtttcgaccatttccgaaaagaactcgggcataaactctatgatttctctggacgtggtgttgtcgaaactctcaaagtacgcagtcaggaacgtgcgcgacatgtcgtcgggaaactcgcgcggaaacatgttgttgtaaccgaacgggtcccatagcgccaaaaccaaatctgccagcgtcaatagaatgagcacgatgccgacaatggagctggcttggatagcgattcgagttaacggccggctcgaggaattcttttttgctcacctgtgattgctcctactcaaatacaaaaacatcaaattttctgtcaataaagcatatttatttatatttattttacaggaaagaattccttttaaagtgtattttaacctataatgaaaaacgattaaaaaaaatacataaaataattcgaaaatttttgaatagcccaggttgataaaaattcatttcatacgttttataacttatgcccctaagtattttttgaccatagtgtttcaattctacattaattttacagagtagaatgaaacgccacctactcagccaagaggcgaaaaggttagctcgccaagcagagagggcgccagtgctcactactttttataattctcaacttctttttccagactcagttcgtatatatagacctattttcaatttaacgtcgggatcgggataacctgccgtgttttagagctagaaatagcaagttaaaataaggctagtccgttatcaacttgaaaaagtggcaccgagtcggtgcttttttttttgcctacctggagcctgagagttgttcaataaaataaaaatgtttcgtttttttgctttcgccagtatttattatttttcatcaatatgtattcaatttggtatgtatttagtaattgtaatatatagacaatggttttccgttgacgtacatacatctgacgtgtgtttatttagacataatagttatgttttcacatctttttaatgttcgcttaatgcgtatgcattctagacaattgtgctcggcaacagtatatttgtggtgtgccaaccaacaacctgcaggagctccagcttttgtctcgaggatctcggatctgacaatgttcagtgcagagactcggctacgcctcgtggactttgaagttgaccaacaatgtttattcttacctctaatagtcctctgtggcaaggtcaagattctgttagaagccaatgaagaacctggttgttcaataacattttgttcgtctaatatttcactaccgcttgacgttggctgcacttcatgtacctcatctataaacgcttcttctgtatcgctctggacgtcatcttcacttacgtgatctgatatttcactgtcagaatcctcaccaacaagctcgtcatcgctttgcagaagagcagagaggatatgctcatcgtctaaagaactacccattttattatatattagtcacgatatctataacaagaaaatatatatataataagttatcacgtaagtagaacatgaaataacaatataattatcgtatgagttaaatcttaaaagtcacgtaaaagataatcatgcgtcattttgactcacgcggtcgttatagttcaaaatcagtgacacttaccgcattgacaagcacgcctcacgggagctccaagcggcgactgagatgtcctaaatgcacagcgacggattcgcgctatttagaaagagagagcaatatttcaagaatgcatgcgtcaattttacgcagactatctttctagggttaaaaaagatttgcgctttactcgacctaaactttaaacacgtcatagaatcttcgtttgacaaaaaccacattgtggccaagctgtgtgacgcgacgcgcgctaaagaatggcaaaccaagtcgcgcgagcgtcgactctagaggatccccgggtaccgagctcgaattcgtaatcatggtcatagctgtttcctgtgtgaaattgttatccgctcacaattccacacaacatacgagccggaagcataaagtgtaaagcctggggtgcctaatgagtgagctaactcacattaattgcgttgcgctcactgcccgctttccagtcgggaaacctgtcgtgccagctgcattaatgaatcggccaacgcgcggggagaggcggtttgcgtattgggcgctcttccgcttcctcgctcactgactcgctgcgctcggtcgttcggctgcggcgagcggtatcagctcactcaaaggcggtaatacggt

SEQ ID NO: 14 - protein, 238 aa, Artificial Sequence
  eGFR
MSKGEELFTGVVPILVELDGDVNGHKFSVSGEGEGDATYGKLTLKFICTTGKLPVPWPTLVTTLTYGVQCFSRYPDHMKQHDFFKSAMPEGYVQERTIFFKDDGNYKTRAEVKFEGDTLVNRIELKGIDFKEDGNILGHKLEYNYNSHNVYIMADKQKNGIKVNFKIRHNIEDGSVQLADHYQQNTPIGDGPVLLPDNHYLSTQSALSKDPNEKRDHMVLLEFVTAAGITLGMDELYK

SEQ ID NO: 15 - DNA, 9848 bp, Artificial Sequence
  pBac-[U6-gRNA-Slx]-[U6-gRNA-Mia#1]-[Opie2-eGFP-p10]-[U6-gRNA-Mia# 2]
tatccacagaatcaggggataacgcaggaaagaacatgtgagcaaaaggccagcaaaaggccaggaaccgtaaaaaggccgcgttgctggcgtttttccataggctccgcccccctgacgagcatcacaaaaatcgacgctcaagtcagaggtggcgaaacccgacaggactataaagataccaggcgtttccccctggaagctccctcgtgcgctctcctgttccgaccctgccgcttaccggatacctgtccgcctttctcccttcgggaagcgtggcgctttctcaatgctcacgctgtaggtatctcagttcggtgtaggtcgttcgctccaagctgggctgtgtgcacgaaccccccgttcagcccgaccgctgcgccttatccggtaactatcgtcttgagtccaacccggtaagacacgacttatcgccactggcagcagccactggtaacaggattagcagagcgaggtatgtaggcggtgctacagagttcttgaagtggtggcctaactacggctacactagaaggacagtatttggtatctgcgctctgctgaagccagttaccttcggaaaaagagttggtagctcttgatccggcaaacaaaccaccgctggtagcggtggtttttttgtttgcaagcagcagattacgcgcagaaaaaaaggatctcaagaagatcctttgatcttttctacggggtctgacgctcagtggaacgaaaactcacgttaagggattttggtcatgagattatcaaaaaggatcttcacctagatccttttaaattaaaaatgaagttttaaatcaatctaaagtatatatgagtaaacttggtctgacagttaccaatgcttaatcagtgaggcacctatctcagcgatctgtctatttcgttcatccatagttgcctgactccccgtcgtgtagataactacgatacgggagggcttaccatctggccccagtgctgcaatgataccgcgagacccacgctcaccggctccagatttatcagcaataaaccagccagccggaagggccgagcgcagaagtggtcctgcaactttatccgcctccatccagtctattaattgttgccgggaagctagagtaagtagttcgccagttaatagtttgcgcaacgttgttgccattgctacaggcatcgtggtgtcacgctcgtcgtttggtatggcttcattcagctccggttcccaacgatcaaggcgagttacatgatcccccatgttgtgcaaaaaagcggttagctccttcggtcctccgatcgttgtcagaagtaagttggccgcagtgttatcactcatggttatggcagcactgcataattctcttactgtcatgccatccgtaagatgcttttctgtgactggtgagtactcaaccaagtcattctgagaatagtgtatgcggcgaccgagttgctcttgcccggcgtcaatacgggataataccgcgccacatagcagaactttaaaagtgctcatcattggaaaacgttcttcggggcgaaaactctcaaggatcttaccgctgttgagatccagttcgatgtaacccactcgtgcacccaactgatcttcagcatcttttactttcaccagcgtttctgggtgagcaaaaacaggaaggcaaaatgccgcaaaaaagggaataagggcgacacggaaatgttgaatactcatactcttcctttttcaatattattgaagcatttatcagggttattgtctcatgagcggatacatatttgaatgtatttagaaaaataaacaaataggggttccgcgcacatttccccgaaaagtgccacctgacgtctaagaaaccattattatcatgacattaacctataaaaataggcgtatcacgaggccctttcgtctcgcgcgtttcggtgatgacggtgaaaacctctgacacatgcagctcccggagacggtcacagcttgtctgtaagcggatgccgggagcagacaagcccgtcagggcgcgtcagcgggtgttggcgggtgtcggggctggcttaactatgcggcatcagagcagattgtactgagagtgcaccatatgcggtgtgaaataccgcacagatgcgtaaggagaaaataccgcatcaggcgccattcgccattcaggctgcgcaactgttgggaagggcgatcggtgcgggcctcttcgctattacgccagctggcgaaagggggatgtgctgcaaggcgattaagttgggtaacgccagggttttcccagtcacgacgttgtaaaacgacggccagtgccaagctttgtttaaaatataacaaaattgtgatcccacaaaatgaagtggggcaaaatcaaataattaactagtgtccgtaaacttgttggtcttcaactttttgaggaacacgttggacggcaaatcgtgactataacacaagttgatttaataattttagccaacacgtcgggctgcgtgttttttgcgctctgtgtacacgttgattaactggtcgattaaataatttaatttttggttcttctttaaatctgtgatgaaattttttaaaataactttaaattcttcattggtaaaaaatgccacgttttgcaacttgtgagggtctaatatgaggtcaaactcagtaggagttttatccaaaaaagaaaacatgattacgtctgtacacgaacgcgtattaacgcagagtgcaaagtataagagggttaaaaaatatattttacgcaccatatacgcatcgggttgatatcgttaatatggatcaatttgaacagttgattaacgtgtctctgctcaagtctttgatcaaaacgcaaatcgacgaaaatgtgtcggacaatatcaagtcgatgagcgaaaaactaaaaaggctagaatacgacaatctcacagacagcgttgagatatacggtattcacgacagcaggctgaataataaaaaaattagaaactattatttaaccctagaaagataatcatattgtgacgtacgttaaagataatcatgcgtaaaattgacgcatgtgttttatcggtctgtatatcgaggtttatttattaatttgaatagatattaagttttattatatttacacttacatactaataataaattcaacaaacaatttatttatgtttatttatttattaaaaaaaaacaaaaactcaaaatttcttctataaagtaacaaaacttttaaacattctctcttttacaaaaataaacttattttgtactttaaaaacagtcatgttgtattataaaataagtaattagcttaacttatacataatagaaacaaattatacttattagtcagtcagaaacaactttggcacatatcaatattatgctctcgacaaataacttttttgcattttttgcacgatgcatttgcctttcgccttattttagaggggcagtaagtacagtaagtacgttttttcattactggctcttcagtactgtcatctgatgtaccaggcacttcatttggcaaaatattagagatattatcgcgcaaatatctcttcaaagtaggagcttctaaacgcttacgcataaacgatgacgtcaggctcatgtaaaggtttctcataaattttttgcgactttgaaccttttctcccttgctactgacattatggctgtatataataaaagaatttatgcaggcaatgtttatcattccgtacaataatgccataggccacctattcgtcttcctactgcaggtcatcacagaacacatttggtctagcgtgtccactccgcctttagtttgattataatacataaccatttgcggtttaccggtactttcgttgatagaagcatcctcatcacaagatgataataagtataccatcttagctggcttcggtttatatgagacgagagtaaggggtccgtcaaaacaaaacatcgatgttcccactggcctggagcgactgtttttcagtacttccggtatctcgcgtttgtttgatcgcacggttcccacaatggttaattcgagctcgcccggggtcctaggtttttgctcacctgtgattgctcctactcaaatacaaaaacatcaaattttctgtcaataaagcatatttatttatatttattttacaggaaagaattccttttaaagtgtattttaacctataatgaaaaacgattaaaaaaaatacataaaataattcgaaaatttttgaatagcccaggttgataaaaattcatttcatacgttttataacttatgcccctaagtattttttgaccatagtgtttcaattctacattaattttacagagtagaatgaaacgccacctactcagccaagaggcgaaaaggttagctcgccaagcagagagggcgccagtgctcactactttttataattctcaacttctttttccagactcagttcgtatatatagacctattttcaatttaacgtcgggcggcagcggcgggaatgggttttagagctagaaatagcaagttaaaataaggctagtccgttatcaacttgaaaaagtggcaccgagtcggtgcttttttttttgcctacctggagcctgagagttgttcaataaaataaaaatgtttcgtttttttgctttcgccagtatttattatttttcatcaatatgtattcaatttggtatgtatttagtaattgtaatatatagacaatggttttccgttgacgtacatacatctgacgtgtgtttatttagacataatagttatgttttcacatctttttaatgttcgcttaatgcgtatgcattctagacaattgtgctcggcaacagtatatttgtggtgtgccaaccaacaacctgcaggagctccagcttttgtaggcctccgttgtatgttgtagcgtctgtgaagcgtcctactcctaagcatgacttgaagcacaacttacctaagccatgacagcctcctgtcgtgtatcactgacagctcgactctctacgatatctaagctgatgctagcgaattcttttttgctcacctgtgattgctcctactcaaatacaaaaacatcaaattttctgtcaataaagcatatttatttatatttattttacaggaaagaattccttttaaagtgtattttaacctataatgaaaaacgattaaaaaaaatacataaaataattcgaaaatttttgaatagcccaggttgataaaaattcatttcatacgttttataacttatgcccctaagtattttttgaccatagtgtttcaattctacattaattttacagagtagaatgaaacgccacctactcagccaagaggcgaaaaggttagctcgccaagcagagagggcgccagtgctcactactttttataattctcaacttctttttccagactcagttcgtatatatagacctattttcaatttaacgtcggagaatccccttgttgcggggttttagagctagaaatagcaagttaaaataaggctagtccgttatcaacttgaaaaagtggcaccgagtcggtgcttttttttttgcctacctggagcctgagagttgttcaataaaataaaaatgtttcgtttttttgctttcgccagtatttattatttttcatcaatatgtattcaatttggtatgtatttagtaattgtaatatatagacaatggttttccgttgacgtacatacatctgacgtgtgtttatttagacataatagttatgttttcacatctttttaatgttcgcttaatgcgtatgcattctagacaattgtgctcggcaacagtatatttgtggtgtgccaaccaacaacctgcaggagctccagcttttgtcttaagcatactcggtggcctccccaccaccaacttttttgcactgcaaaaaaacacgcttttgcacgcgggcccatacatagtacaaactctacgtttcgtagactattttacataaatagtctacaccgttgtatacgctccaaatacactaccacacattgaacctttttgcagtgcaaaaaagtacgtgtcggcagtcacgtaggccggccttatcgggtcgcgtcctgtcacgtacgaatcacattatcggaccggacgagtgttgtcttatcgtgacaggacgccagcttcctgtgttgctaaccgcagccggacgcaactccttatcggaacaggacgcgcctccatatcagccgcgcgttatctcatgcgcgtgaccggacacgaggcgcccgtcccgcttatcgcgcctataaatacagcccgcaacgatctggtaaacacagttgaacagcatctgttacagcgacacaacatgagccggtccaacaacgccaacgcgcccacgccatccaaccgccgccgcaacctgtctctggtgcaaaatgagcaagggcgaggagctgttcaccggggtggtgcccatcctggtcgagctggacggcgacgtaaacggccacaagttcagcgtgtccggcgagggcgagggcgatgccacctacggcaagctgaccctgaagttcatctgcaccaccggcaagctgcccgtgccctggcccaccctcgtgaccaccctgacctacggcgtgcagtgcttcagccgctaccccgaccacatgaagcagcacgacttcttcaagtccgccatgcccgaaggctacgtccaggagcgcaccatcttcttcaaggacgacggcaactacaagacccgcgccgaggtgaagttcgagggcgacaccctggtgaaccgcatcgagctgaagggcatcgacttcaaggaggacggcaacatcctggggcacaagctggagtacaactacaacagccacaacgtctatatcatggccgacaagcagaagaacggcatcaaggtgaacttcaagatccgccacaacatcgaggacggcagcgtgcagctcgccgaccactaccagcagaacacccccatcggcgacggccccgtgctgctgcccgacaaccactacctgagcacccagtccgccctgagcaaagaccccaacgagaagcgcgatcacatggtcctgctggagttcgtgaccgccgccgggatcactctcggcatggacgagctgtacaagtaagcggccgctagaatgaatcgtttttaaaataacaaatcaattgttttataatattcgtacgattctttgattatgtaataaaatgtgatcattaggaagattacgaaaaatataaaaaatatgagttctgtgtgtataacaaatgctgtaaacgccacaattgtgtttgttgcaaataaacccatgattatttgattaaaattgttgttttctttgttcatagacaatagtgtgttttgcctaaacgtgtactgcataaactccatgcgagtgtatagcgagctagtggctaacgcttgccccaccaaagtagattcgtcaaaatcctcaatttcatcaccctcctccaagtttaacatttggccgtcggaattaacttctaaagatgccacataatctaataaatgaaatagagattcaaacgtggcgtcatcgtccgtttcgaccatttccgaaaagaactcgggcataaactctatgatttctctggacgtggtgttgtcgaaactctcaaagtacgcagtcaggaacgtgcgcgacatgtcgtcgggaaactcgcgcggaaacatgttgttgtaaccgaacgggtcccatagcgccaaaaccaaatctgccagcgtcaatagaatgagcacgatgccgacaatggagctggcttggatagcgattcgagttaacggccggctcgaggaattcttttttgctcacctgtgattgctcctactcaaatacaaaaacatcaaattttctgtcaataaagcatatttatttatatttattttacaggaaagaattccttttaaagtgtattttaacctataatgaaaaacgattaaaaaaaatacataaaataattcgaaaatttttgaatagcccaggttgataaaaattcatttcatacgttttataacttatgcccctaagtattttttgaccatagtgtttcaattctacattaattttacagagtagaatgaaacgccacctactcagccaagaggcgaaaaggttagctcgccaagcagagagggcgccagtgctcactactttttataattctcaacttctttttccagactcagttcgtatatatagacctattttcaatttaacgtcggagctctgaccatccgcatggttttagagctagaaatagcaagttaaaataaggctagtccgttatcaacttgaaaaagtggcaccgagtcggtgcttttttttttgcctacctggagcctgagagttgttcaataaaataaaaatgtttcgtttttttgctttcgccagtatttattatttttcatcaatatgtattcaatttggtatgtatttagtaattgtaatatatagacaatggttttccgttgacgtacatacatctgacgtgtgtttatttagacataatagttatgttttcacatctttttaatgttcgcttaatgcgtatgcattctagacaattgtgctcggcaacagtatatttgtggtgtgccaaccaacaacctgcaggagctccagcttttgtgaggatctcggatctgacaatgttcagtgcagagactcggctacgcctcgtggactttgaagttgaccaacaatgtttattcttacctctaatagtcctctgtggcaaggtcaagattctgttagaagccaatgaagaacctggttgttcaataacattttgttcgtctaatatttcactaccgcttgacgttggctgcacttcatgtacctcatctataaacgcttcttctgtatcgctctggacgtcatcttcacttacgtgatctgatatttcactgtcagaatcctcaccaacaagctcgtcatcgctttgcagaagagcagagaggatatgctcatcgtctaaagaactacccattttattatatattagtcacgatatctataacaagaaaatatatatataataagttatcacgtaagtagaacatgaaataacaatataattatcgtatgagttaaatcttaaaagtcacgtaaaagataatcatgcgtcattttgactcacgcggtcgttatagttcaaaatcagtgacacttaccgcattgacaagcacgcctcacgggagctccaagcggcgactgagatgtcctaaatgcacagcgacggattcgcgctatttagaaagagagagcaatatttcaagaatgcatgcgtcaattttacgcagactatctttctagggttaaaaaagatttgcgctttactcgacctaaactttaaacacgtcatagaatcttcgtttgacaaaaaccacattgtggccaagctgtgtgacgcgacgcgcgctaaagaatggcaaaccaagtcgcgcgagcgtcgactctagaggatccccgggtaccgagctcgaattcgtaatcatggtcatagctgtttcctgtgtgaaattgttatccgctcacaattccacacaacatacgagccggaagcataaagtgtaaagcctggggtgcctaatgagtgagctaactcacattaattgcgttgcgctcactgcccgctttccagtcgggaaacctgtcgtgccagctgcattaatgaatcggccaacgcgcggggagaggcggtttgcgtattgggcgctcttccgcttcctcgctcactgactcgctgcgctcggtcgttcggctgcggcgagcggtatcagctcactcaaaggcggtaatacggt

SEQ ID NO: 16 - DNA, 9848 bp, Artificial Sequence
  pBac-[U6-gRNA-Slx]-[U6-gRNA-Zpg#1]-[Opie2-eGFP-p10]-[U6-gRNA-Zpg# 2]
tatccacagaatcaggggataacgcaggaaagaacatgtgagcaaaaggccagcaaaaggccaggaaccgtaaaaaggccgcgttgctggcgtttttccataggctccgcccccctgacgagcatcacaaaaatcgacgctcaagtcagaggtggcgaaacccgacaggactataaagataccaggcgtttccccctggaagctccctcgtgcgctctcctgttccgaccctgccgcttaccggatacctgtccgcctttctcccttcgggaagcgtggcgctttctcaatgctcacgctgtaggtatctcagttcggtgtaggtcgttcgctccaagctgggctgtgtgcacgaaccccccgttcagcccgaccgctgcgccttatccggtaactatcgtcttgagtccaacccggtaagacacgacttatcgccactggcagcagccactggtaacaggattagcagagcgaggtatgtaggcggtgctacagagttcttgaagtggtggcctaactacggctacactagaaggacagtatttggtatctgcgctctgctgaagccagttaccttcggaaaaagagttggtagctcttgatccggcaaacaaaccaccgctggtagcggtggtttttttgtttgcaagcagcagattacgcgcagaaaaaaaggatctcaagaagatcctttgatcttttctacggggtctgacgctcagtggaacgaaaactcacgttaagggattttggtcatgagattatcaaaaaggatcttcacctagatccttttaaattaaaaatgaagttttaaatcaatctaaagtatatatgagtaaacttggtctgacagttaccaatgcttaatcagtgaggcacctatctcagcgatctgtctatttcgttcatccatagttgcctgactccccgtcgtgtagataactacgatacgggagggcttaccatctggccccagtgctgcaatgataccgcgagacccacgctcaccggctccagatttatcagcaataaaccagccagccggaagggccgagcgcagaagtggtcctgcaactttatccgcctccatccagtctattaattgttgccgggaagctagagtaagtagttcgccagttaatagtttgcgcaacgttgttgccattgctacaggcatcgtggtgtcacgctcgtcgtttggtatggcttcattcagctccggttcccaacgatcaaggcgagttacatgatcccccatgttgtgcaaaaaagcggttagctccttcggtcctccgatcgttgtcagaagtaagttggccgcagtgttatcactcatggttatggcagcactgcataattctcttactgtcatgccatccgtaagatgcttttctgtgactggtgagtactcaaccaagtcattctgagaatagtgtatgcggcgaccgagttgctcttgcccggcgtcaatacgggataataccgcgccacatagcagaactttaaaagtgctcatcattggaaaacgttcttcggggcgaaaactctcaaggatcttaccgctgttgagatccagttcgatgtaacccactcgtgcacccaactgatcttcagcatcttttactttcaccagcgtttctgggtgagcaaaaacaggaaggcaaaatgccgcaaaaaagggaataagggcgacacggaaatgttgaatactcatactcttcctttttcaatattattgaagcatttatcagggttattgtctcatgagcggatacatatttgaatgtatttagaaaaataaacaaataggggttccgcgcacatttccccgaaaagtgccacctgacgtctaagaaaccattattatcatgacattaacctataaaaataggcgtatcacgaggccctttcgtctcgcgcgtttcggtgatgacggtgaaaacctctgacacatgcagctcccggagacggtcacagcttgtctgtaagcggatgccgggagcagacaagcccgtcagggcgcgtcagcgggtgttggcgggtgtcggggctggcttaactatgcggcatcagagcagattgtactgagagtgcaccatatgcggtgtgaaataccgcacagatgcgtaaggagaaaataccgcatcaggcgccattcgccattcaggctgcgcaactgttgggaagggcgatcggtgcgggcctcttcgctattacgccagctggcgaaagggggatgtgctgcaaggcgattaagttgggtaacgccagggttttcccagtcacgacgttgtaaaacgacggccagtgccaagctttgtttaaaatataacaaaattgtgatcccacaaaatgaagtggggcaaaatcaaataattaactagtgtccgtaaacttgttggtcttcaactttttgaggaacacgttggacggcaaatcgtgactataacacaagttgatttaataattttagccaacacgtcgggctgcgtgttttttgcgctctgtgtacacgttgattaactggtcgattaaataatttaatttttggttcttctttaaatctgtgatgaaattttttaaaataactttaaattcttcattggtaaaaaatgccacgttttgcaacttgtgagggtctaatatgaggtcaaactcagtaggagttttatccaaaaaagaaaacatgattacgtctgtacacgaacgcgtattaacgcagagtgcaaagtataagagggttaaaaaatatattttacgcaccatatacgcatcgggttgatatcgttaatatggatcaatttgaacagttgattaacgtgtctctgctcaagtctttgatcaaaacgcaaatcgacgaaaatgtgtcggacaatatcaagtcgatgagcgaaaaactaaaaaggctagaatacgacaatctcacagacagcgttgagatatacggtattcacgacagcaggctgaataataaaaaaattagaaactattatttaaccctagaaagataatcatattgtgacgtacgttaaagataatcatgcgtaaaattgacgcatgtgttttatcggtctgtatatcgaggtttatttattaatttgaatagatattaagttttattatatttacacttacatactaataataaattcaacaaacaatttatttatgtttatttatttattaaaaaaaaacaaaaactcaaaatttcttctataaagtaacaaaacttttaaacattctctcttttacaaaaataaacttattttgtactttaaaaacagtcatgttgtattataaaataagtaattagcttaacttatacataatagaaacaaattatacttattagtcagtcagaaacaactttggcacatatcaatattatgctctcgacaaataacttttttgcattttttgcacgatgcatttgcctttcgccttattttagaggggcagtaagtacagtaagtacgttttttcattactggctcttcagtactgtcatctgatgtaccaggcacttcatttggcaaaatattagagatattatcgcgcaaatatctcttcaaagtaggagcttctaaacgcttacgcataaacgatgacgtcaggctcatgtaaaggtttctcataaattttttgcgactttgaaccttttctcccttgctactgacattatggctgtatataataaaagaatttatgcaggcaatgtttatcattccgtacaataatgccataggccacctattcgtcttcctactgcaggtcatcacagaacacatttggtctagcgtgtccactccgcctttagtttgattataatacataaccatttgcggtttaccggtactttcgttgatagaagcatcctcatcacaagatgataataagtataccatcttagctggcttcggtttatatgagacgagagtaaggggtccgtcaaaacaaaacatcgatgttcccactggcctggagcgactgtttttcagtacttccggtatctcgcgtttgtttgatcgcacggttcccacaatggttaattcgagctcgcccggggtcctaggtttttgctcacctgtgattgctcctactcaaatacaaaaacatcaaattttctgtcaataaagcatatttatttatatttattttacaggaaagaattccttttaaagtgtattttaacctataatgaaaaacgattaaaaaaaatacataaaataattcgaaaatttttgaatagcccaggttgataaaaattcatttcatacgttttataacttatgcccctaagtattttttgaccatagtgtttcaattctacattaattttacagagtagaatgaaacgccacctactcagccaagaggcgaaaaggttagctcgccaagcagagagggcgccagtgctcactactttttataattctcaacttctttttccagactcagttcgtatatatagacctattttcaatttaacgtcgggcggcagcggcgggaatgggttttagagctagaaatagcaagttaaaataaggctagtccgttatcaacttgaaaaagtggcaccgagtcggtgcttttttttttgcctacctggagcctgagagttgttcaataaaataaaaatgtttcgtttttttgctttcgccagtatttattatttttcatcaatatgtattcaatttggtatgtatttagtaattgtaatatatagacaatggttttccgttgacgtacatacatctgacgtgtgtttatttagacataatagttatgttttcacatctttttaatgttcgcttaatgcgtatgcattctagacaattgtgctcggcaacagtatatttgtggtgtgccaaccaacaacctgcaggagctccagcttttgtaggcctccgttgtatgttgtagcgtctgtgaagcgtcctactcctaagcatgacttgaagcacaacttacctaagccatgacagcctcctgtcgtgtatcactgacagctcgactctctacgatatctaagctgatgctagcgaattcttttttgctcacctgtgattgctcctactcaaatacaaaaacatcaaattttctgtcaataaagcatatttatttatatttattttacaggaaagaattccttttaaagtgtattttaacctataatgaaaaacgattaaaaaaaatacataaaataattcgaaaatttttgaatagcccaggttgataaaaattcatttcatacgttttataacttatgcccctaagtattttttgaccatagtgtttcaattctacattaattttacagagtagaatgaaacgccacctactcagccaagaggcgaaaaggttagctcgccaagcagagagggcgccagtgctcactactttttataattctcaacttctttttccagactcagttcgtatatatagacctattttcaatttaacgtcggcaactgcaaacgcattccggttttagagctagaaatagcaagttaaaataaggctagtccgttatcaacttgaaaaagtggcaccgagtcggtgcttttttttttgcctacctggagcctgagagttgttcaataaaataaaaatgtttcgtttttttgctttcgccagtatttattatttttcatcaatatgtattcaatttggtatgtatttagtaattgtaatatatagacaatggttttccgttgacgtacatacatctgacgtgtgtttatttagacataatagttatgttttcacatctttttaatgttcgcttaatgcgtatgcattctagacaattgtgctcggcaacagtatatttgtggtgtgccaaccaacaacctgcaggagctccagcttttgtcttaagcatactcggtggcctccccaccaccaacttttttgcactgcaaaaaaacacgcttttgcacgcgggcccatacatagtacaaactctacgtttcgtagactattttacataaatagtctacaccgttgtatacgctccaaatacactaccacacattgaacctttttgcagtgcaaaaaagtacgtgtcggcagtcacgtaggccggccttatcgggtcgcgtcctgtcacgtacgaatcacattatcggaccggacgagtgttgtcttatcgtgacaggacgccagcttcctgtgttgctaaccgcagccggacgcaactccttatcggaacaggacgcgcctccatatcagccgcgcgttatctcatgcgcgtgaccggacacgaggcgcccgtcccgcttatcgcgcctataaatacagcccgcaacgatctggtaaacacagttgaacagcatctgttacagcgacacaacatgagccggtccaacaacgccaacgcgcccacgccatccaaccgccgccgcaacctgtctctggtgcaaaatgagcaagggcgaggagctgttcaccggggtggtgcccatcctggtcgagctggacggcgacgtaaacggccacaagttcagcgtgtccggcgagggcgagggcgatgccacctacggcaagctgaccctgaagttcatctgcaccaccggcaagctgcccgtgccctggcccaccctcgtgaccaccctgacctacggcgtgcagtgcttcagccgctaccccgaccacatgaagcagcacgacttcttcaagtccgccatgcccgaaggctacgtccaggagcgcaccatcttcttcaaggacgacggcaactacaagacccgcgccgaggtgaagttcgagggcgacaccctggtgaaccgcatcgagctgaagggcatcgacttcaaggaggacggcaacatcctggggcacaagctggagtacaactacaacagccacaacgtctatatcatggccgacaagcagaagaacggcatcaaggtgaacttcaagatccgccacaacatcgaggacggcagcgtgcagctcgccgaccactaccagcagaacacccccatcggcgacggccccgtgctgctgcccgacaaccactacctgagcacccagtccgccctgagcaaagaccccaacgagaagcgcgatcacatggtcctgctggagttcgtgaccgccgccgggatcactctcggcatggacgagctgtacaagtaagcggccgctagaatgaatcgtttttaaaataacaaatcaattgttttataatattcgtacgattctttgattatgtaataaaatgtgatcattaggaagattacgaaaaatataaaaaatatgagttctgtgtgtataacaaatgctgtaaacgccacaattgtgtttgttgcaaataaacccatgattatttgattaaaattgttgttttctttgttcatagacaatagtgtgttttgcctaaacgtgtactgcataaactccatgcgagtgtatagcgagctagtggctaacgcttgccccaccaaagtagattcgtcaaaatcctcaatttcatcaccctcctccaagtttaacatttggccgtcggaattaacttctaaagatgccacataatctaataaatgaaatagagattcaaacgtggcgtcatcgtccgtttcgaccatttccgaaaagaactcgggcataaactctatgatttctctggacgtggtgttgtcgaaactctcaaagtacgcagtcaggaacgtgcgcgacatgtcgtcgggaaactcgcgcggaaacatgttgttgtaaccgaacgggtcccatagcgccaaaaccaaatctgccagcgtcaatagaatgagcacgatgccgacaatggagctggcttggatagcgattcgagttaacggccggctcgaggaattcttttttgctcacctgtgattgctcctactcaaatacaaaaacatcaaattttctgtcaataaagcatatttatttatatttattttacaggaaagaattccttttaaagtgtattttaacctataatgaaaaacgattaaaaaaaatacataaaataattcgaaaatttttgaatagcccaggttgataaaaattcatttcatacgttttataacttatgcccctaagtattttttgaccatagtgtttcaattctacattaattttacagagtagaatgaaacgccacctactcagccaagaggcgaaaaggttagctcgccaagcagagagggcgccagtgctcactactttttataattctcaacttctttttccagactcagttcgtatatatagacctattttcaatttaacgtcggcccaagttgcacctgcagggttttagagctagaaatagcaagttaaaataaggctagtccgttatcaacttgaaaaagtggcaccgagtcggtgcttttttttttgcctacctggagcctgagagttgttcaataaaataaaaatgtttcgtttttttgctttcgccagtatttattatttttcatcaatatgtattcaatttggtatgtatttagtaattgtaatatatagacaatggttttccgttgacgtacatacatctgacgtgtgtttatttagacataatagttatgttttcacatctttttaatgttcgcttaatgcgtatgcattctagacaattgtgctcggcaacagtatatttgtggtgtgccaaccaacaacctgcaggagctccagcttttgtgaggatctcggatctgacaatgttcagtgcagagactcggctacgcctcgtggactttgaagttgaccaacaatgtttattcttacctctaatagtcctctgtggcaaggtcaagattctgttagaagccaatgaagaacctggttgttcaataacattttgttcgtctaatatttcactaccgcttgacgttggctgcacttcatgtacctcatctataaacgcttcttctgtatcgctctggacgtcatcttcacttacgtgatctgatatttcactgtcagaatcctcaccaacaagctcgtcatcgctttgcagaagagcagagaggatatgctcatcgtctaaagaactacccattttattatatattagtcacgatatctataacaagaaaatatatatataataagttatcacgtaagtagaacatgaaataacaatataattatcgtatgagttaaatcttaaaagtcacgtaaaagataatcatgcgtcattttgactcacgcggtcgttatagttcaaaatcagtgacacttaccgcattgacaagcacgcctcacgggagctccaagcggcgactgagatgtcctaaatgcacagcgacggattcgcgctatttagaaagagagagcaatatttcaagaatgcatgcgtcaattttacgcagactatctttctagggttaaaaaagatttgcgctttactcgacctaaactttaaacacgtcatagaatcttcgtttgacaaaaaccacattgtggccaagctgtgtgacgcgacgcgcgctaaagaatggcaaaccaagtcgcgcgagcgtcgactctagaggatccccgggtaccgagctcgaattcgtaatcatggtcatagctgtttcctgtgtgaaattgttatccgctcacaattccacacaacatacgagccggaagcataaagtgtaaagcctggggtgcctaatgagtgagctaactcacattaattgcgttgcgctcactgcccgctttccagtcgggaaacctgtcgtgccagctgcattaatgaatcggccaacgcgcggggagaggcggtttgcgtattgggcgctcttccgcttcctcgctcactgactcgctgcgctcggtcgttcggctgcggcgagcggtatcagctcactcaaaggcggtaatacggt

SEQ ID NO: 17 - DNA, 9848 bp, Artificial Sequence
  pBac-[U6-gRNA-Slx]-[U6-gRNA-PIWI#1]-[Opie2-eGFP-p10]-[U6-gRNA-PIW I#2]
tatccacagaatcaggggataacgcaggaaagaacatgtgagcaaaaggccagcaaaaggccaggaaccgtaaaaaggccgcgttgctggcgtttttccataggctccgcccccctgacgagcatcacaaaaatcgacgctcaagtcagaggtggcgaaacccgacaggactataaagataccaggcgtttccccctggaagctccctcgtgcgctctcctgttccgaccctgccgcttaccggatacctgtccgcctttctcccttcgggaagcgtggcgctttctcaatgctcacgctgtaggtatctcagttcggtgtaggtcgttcgctccaagctgggctgtgtgcacgaaccccccgttcagcccgaccgctgcgccttatccggtaactatcgtcttgagtccaacccggtaagacacgacttatcgccactggcagcagccactggtaacaggattagcagagcgaggtatgtaggcggtgctacagagttcttgaagtggtggcctaactacggctacactagaaggacagtatttggtatctgcgctctgctgaagccagttaccttcggaaaaagagttggtagctcttgatccggcaaacaaaccaccgctggtagcggtggtttttttgtttgcaagcagcagattacgcgcagaaaaaaaggatctcaagaagatcctttgatcttttctacggggtctgacgctcagtggaacgaaaactcacgttaagggattttggtcatgagattatcaaaaaggatcttcacctagatccttttaaattaaaaatgaagttttaaatcaatctaaagtatatatgagtaaacttggtctgacagttaccaatgcttaatcagtgaggcacctatctcagcgatctgtctatttcgttcatccatagttgcctgactccccgtcgtgtagataactacgatacgggagggcttaccatctggccccagtgctgcaatgataccgcgagacccacgctcaccggctccagatttatcagcaataaaccagccagccggaagggccgagcgcagaagtggtcctgcaactttatccgcctccatccagtctattaattgttgccgggaagctagagtaagtagttcgccagttaatagtttgcgcaacgttgttgccattgctacaggcatcgtggtgtcacgctcgtcgtttggtatggcttcattcagctccggttcccaacgatcaaggcgagttacatgatcccccatgttgtgcaaaaaagcggttagctccttcggtcctccgatcgttgtcagaagtaagttggccgcagtgttatcactcatggttatggcagcactgcataattctcttactgtcatgccatccgtaagatgcttttctgtgactggtgagtactcaaccaagtcattctgagaatagtgtatgcggcgaccgagttgctcttgcccggcgtcaatacgggataataccgcgccacatagcagaactttaaaagtgctcatcattggaaaacgttcttcggggcgaaaactctcaaggatcttaccgctgttgagatccagttcgatgtaacccactcgtgcacccaactgatcttcagcatcttttactttcaccagcgtttctgggtgagcaaaaacaggaaggcaaaatgccgcaaaaaagggaataagggcgacacggaaatgttgaatactcatactcttcctttttcaatattattgaagcatttatcagggttattgtctcatgagcggatacatatttgaatgtatttagaaaaataaacaaataggggttccgcgcacatttccccgaaaagtgccacctgacgtctaagaaaccattattatcatgacattaacctataaaaataggcgtatcacgaggccctttcgtctcgcgcgtttcggtgatgacggtgaaaacctctgacacatgcagctcccggagacggtcacagcttgtctgtaagcggatgccgggagcagacaagcccgtcagggcgcgtcagcgggtgttggcgggtgtcggggctggcttaactatgcggcatcagagcagattgtactgagagtgcaccatatgcggtgtgaaataccgcacagatgcgtaaggagaaaataccgcatcaggcgccattcgccattcaggctgcgcaactgttgggaagggcgatcggtgcgggcctcttcgctattacgccagctggcgaaagggggatgtgctgcaaggcgattaagttgggtaacgccagggttttcccagtcacgacgttgtaaaacgacggccagtgccaagctttgtttaaaatataacaaaattgtgatcccacaaaatgaagtggggcaaaatcaaataattaactagtgtccgtaaacttgttggtcttcaactttttgaggaacacgttggacggcaaatcgtgactataacacaagttgatttaataattttagccaacacgtcgggctgcgtgttttttgcgctctgtgtacacgttgattaactggtcgattaaataatttaatttttggttcttctttaaatctgtgatgaaattttttaaaataactttaaattcttcattggtaaaaaatgccacgttttgcaacttgtgagggtctaatatgaggtcaaactcagtaggagttttatccaaaaaagaaaacatgattacgtctgtacacgaacgcgtattaacgcagagtgcaaagtataagagggttaaaaaatatattttacgcaccatatacgcatcgggttgatatcgttaatatggatcaatttgaacagttgattaacgtgtctctgctcaagtctttgatcaaaacgcaaatcgacgaaaatgtgtcggacaatatcaagtcgatgagcgaaaaactaaaaaggctagaatacgacaatctcacagacagcgttgagatatacggtattcacgacagcaggctgaataataaaaaaattagaaactattatttaaccctagaaagataatcatattgtgacgtacgttaaagataatcatgcgtaaaattgacgcatgtgttttatcggtctgtatatcgaggtttatttattaatttgaatagatattaagttttattatatttacacttacatactaataataaattcaacaaacaatttatttatgtttatttatttattaaaaaaaaacaaaaactcaaaatttcttctataaagtaacaaaacttttaaacattctctcttttacaaaaataaacttattttgtactttaaaaacagtcatgttgtattataaaataagtaattagcttaacttatacataatagaaacaaattatacttattagtcagtcagaaacaactttggcacatatcaatattatgctctcgacaaataacttttttgcattttttgcacgatgcatttgcctttcgccttattttagaggggcagtaagtacagtaagtacgttttttcattactggctcttcagtactgtcatctgatgtaccaggcacttcatttggcaaaatattagagatattatcgcgcaaatatctcttcaaagtaggagcttctaaacgcttacgcataaacgatgacgtcaggctcatgtaaaggtttctcataaattttttgcgactttgaaccttttctcccttgctactgacattatggctgtatataataaaagaatttatgcaggcaatgtttatcattccgtacaataatgccataggccacctattcgtcttcctactgcaggtcatcacagaacacatttggtctagcgtgtccactccgcctttagtttgattataatacataaccatttgcggtttaccggtactttcgttgatagaagcatcctcatcacaagatgataataagtataccatcttagctggcttcggtttatatgagacgagagtaaggggtccgtcaaaacaaaacatcgatgttcccactggcctggagcgactgtttttcagtacttccggtatctcgcgtttgtttgatcgcacggttcccacaatggttaattcgagctcgcccggggtcctaggtttttgctcacctgtgattgctcctactcaaatacaaaaacatcaaattttctgtcaataaagcatatttatttatatttattttacaggaaagaattccttttaaagtgtattttaacctataatgaaaaacgattaaaaaaaatacataaaataattcgaaaatttttgaatagcccaggttgataaaaattcatttcatacgttttataacttatgcccctaagtattttttgaccatagtgtttcaattctacattaattttacagagtagaatgaaacgccacctactcagccaagaggcgaaaaggttagctcgccaagcagagagggcgccagtgctcactactttttataattctcaacttctttttccagactcagttcgtatatatagacctattttcaatttaacgtcgggcggcagcggcgggaatgggttttagagctagaaatagcaagttaaaataaggctagtccgttatcaacttgaaaaagtggcaccgagtcggtgcttttttttttgcctacctggagcctgagagttgttcaataaaataaaaatgtttcgtttttttgctttcgccagtatttattatttttcatcaatatgtattcaatttggtatgtatttagtaattgtaatatatagacaatggttttccgttgacgtacatacatctgacgtgtgtttatttagacataatagttatgttttcacatctttttaatgttcgcttaatgcgtatgcattctagacaattgtgctcggcaacagtatatttgtggtgtgccaaccaacaacctgcaggagctccagcttttgtaggcctccgttgtatgttgtagcgtctgtgaagcgtcctactcctaagcatgacttgaagcacaacttacctaagccatgacagcctcctgtcgtgtatcactgacagctcgactctctacgatatctaagctgatgctagcgaattcttttttgctcacctgtgattgctcctactcaaatacaaaaacatcaaattttctgtcaataaagcatatttatttatatttattttacaggaaagaattccttttaaagtgtattttaacctataatgaaaaacgattaaaaaaaatacataaaataattcgaaaatttttgaatagcccaggttgataaaaattcatttcatacgttttataacttatgcccctaagtattttttgaccatagtgtttcaattctacattaattttacagagtagaatgaaacgccacctactcagccaagaggcgaaaaggttagctcgccaagcagagagggcgccagtgctcactactttttataattctcaacttctttttccagactcagttcgtatatatagacctattttcaatttaacgtcgggtgttggacagcacatcgagttttagagctagaaatagcaagttaaaataaggctagtccgttatcaacttgaaaaagtggcaccgagtcggtgcttttttttttgcctacctggagcctgagagttgttcaataaaataaaaatgtttcgtttttttgctttcgccagtatttattatttttcatcaatatgtattcaatttggtatgtatttagtaattgtaatatatagacaatggttttccgttgacgtacatacatctgacgtgtgtttatttagacataatagttatgttttcacatctttttaatgttcgcttaatgcgtatgcattctagacaattgtgctcggcaacagtatatttgtggtgtgccaaccaacaacctgcaggagctccagcttttgtcttaagcatactcggtggcctccccaccaccaacttttttgcactgcaaaaaaacacgcttttgcacgcgggcccatacatagtacaaactctacgtttcgtagactattttacataaatagtctacaccgttgtatacgctccaaatacactaccacacattgaacctttttgcagtgcaaaaaagtacgtgtcggcagtcacgtaggccggccttatcgggtcgcgtcctgtcacgtacgaatcacattatcggaccggacgagtgttgtcttatcgtgacaggacgccagcttcctgtgttgctaaccgcagccggacgcaactccttatcggaacaggacgcgcctccatatcagccgcgcgttatctcatgcgcgtgaccggacacgaggcgcccgtcccgcttatcgcgcctataaatacagcccgcaacgatctggtaaacacagttgaacagcatctgttacagcgacacaacatgagccggtccaacaacgccaacgcgcccacgccatccaaccgccgccgcaacctgtctctggtgcaaaatgagcaagggcgaggagctgttcaccggggtggtgcccatcctggtcgagctggacggcgacgtaaacggccacaagttcagcgtgtccggcgagggcgagggcgatgccacctacggcaagctgaccctgaagttcatctgcaccaccggcaagctgcccgtgccctggcccaccctcgtgaccaccctgacctacggcgtgcagtgcttcagccgctaccccgaccacatgaagcagcacgacttcttcaagtccgccatgcccgaaggctacgtccaggagcgcaccatcttcttcaaggacgacggcaactacaagacccgcgccgaggtgaagttcgagggcgacaccctggtgaaccgcatcgagctgaagggcatcgacttcaaggaggacggcaacatcctggggcacaagctggagtacaactacaacagccacaacgtctatatcatggccgacaagcagaagaacggcatcaaggtgaacttcaagatccgccacaacatcgaggacggcagcgtgcagctcgccgaccactaccagcagaacacccccatcggcgacggccccgtgctgctgcccgacaaccactacctgagcacccagtccgccctgagcaaagaccccaacgagaagcgcgatcacatggtcctgctggagttcgtgaccgccgccgggatcactctcggcatggacgagctgtacaagtaagcggccgctagaatgaatcgtttttaaaataacaaatcaattgttttataatattcgtacgattctttgattatgtaataaaatgtgatcattaggaagattacgaaaaatataaaaaatatgagttctgtgtgtataacaaatgctgtaaacgccacaattgtgtttgttgcaaataaacccatgattatttgattaaaattgttgttttctttgttcatagacaatagtgtgttttgcctaaacgtgtactgcataaactccatgcgagtgtatagcgagctagtggctaacgcttgccccaccaaagtagattcgtcaaaatcctcaatttcatcaccctcctccaagtttaacatttggccgtcggaattaacttctaaagatgccacataatctaataaatgaaatagagattcaaacgtggcgtcatcgtccgtttcgaccatttccgaaaagaactcgggcataaactctatgatttctctggacgtggtgttgtcgaaactctcaaagtacgcagtcaggaacgtgcgcgacatgtcgtcgggaaactcgcgcggaaacatgttgttgtaaccgaacgggtcccatagcgccaaaaccaaatctgccagcgtcaatagaatgagcacgatgccgacaatggagctggcttggatagcgattcgagttaacggccggctcgaggaattcttttttgctcacctgtgattgctcctactcaaatacaaaaacatcaaattttctgtcaataaagcatatttatttatatttattttacaggaaagaattccttttaaagtgtattttaacctataatgaaaaacgattaaaaaaaatacataaaataattcgaaaatttttgaatagcccaggttgataaaaattcatttcatacgttttataacttatgcccctaagtattttttgaccatagtgtttcaattctacattaattttacagagtagaatgaaacgccacctactcagccaagaggcgaaaaggttagctcgccaagcagagagggcgccagtgctcactactttttataattctcaacttctttttccagactcagttcgtatatatagacctattttcaatttaacgtcggagcacacgtgatcgcaagagttttagagctagaaatagcaagttaaaataaggctagtccgttatcaacttgaaaaagtggcaccgagtcggtgcttttttttttgcctacctggagcctgagagttgttcaataaaataaaaatgtttcgtttttttgctttcgccagtatttattatttttcatcaatatgtattcaatttggtatgtatttagtaattgtaatatatagacaatggttttccgttgacgtacatacatctgacgtgtgtttatttagacataatagttatgttttcacatctttttaatgttcgcttaatgcgtatgcattctagacaattgtgctcggcaacagtatatttgtggtgtgccaaccaacaacctgcaggagctccagcttttgtgaggatctcggatctgacaatgttcagtgcagagactcggctacgcctcgtggactttgaagttgaccaacaatgtttattcttacctctaatagtcctctgtggcaaggtcaagattctgttagaagccaatgaagaacctggttgttcaataacattttgttcgtctaatatttcactaccgcttgacgttggctgcacttcatgtacctcatctataaacgcttcttctgtatcgctctggacgtcatcttcacttacgtgatctgatatttcactgtcagaatcctcaccaacaagctcgtcatcgctttgcagaagagcagagaggatatgctcatcgtctaaagaactacccattttattatatattagtcacgatatctataacaagaaaatatatatataataagttatcacgtaagtagaacatgaaataacaatataattatcgtatgagttaaatcttaaaagtcacgtaaaagataatcatgcgtcattttgactcacgcggtcgttatagttcaaaatcagtgacacttaccgcattgacaagcacgcctcacgggagctccaagcggcgactgagatgtcctaaatgcacagcgacggattcgcgctatttagaaagagagagcaatatttcaagaatgcatgcgtcaattttacgcagactatctttctagggttaaaaaagatttgcgctttactcgacctaaactttaaacacgtcatagaatcttcgtttgacaaaaaccacattgtggccaagctgtgtgacgcgacgcgcgctaaagaatggcaaaccaagtcgcgcgagcgtcgactctagaggatccccgggtaccgagctcgaattcgtaatcatggtcatagctgtttcctgtgtgaaattgttatccgctcacaattccacacaacatacgagccggaagcataaagtgtaaagcctggggtgcctaatgagtgagctaactcacattaattgcgttgcgctcactgcccgctttccagtcgggaaacctgtcgtgccagctgcattaatgaatcggccaacgcgcggggagaggcggtttgcgtattgggcgctcttccgcttcctcgctcactgactcgctgcgctcggtcgttcggctgcggcgagcggtatcagctcactcaaaggcggtaatacggt

SEQ ID NO: 18 - DNA, 9848 bp, Artificial Sequence
  pBac-[U6-gRNA-Slx]-[U6-gRNA-HP1e#1]-[Opie2-eGFP-p10]-[U6-gRNA-HP1 e#2]
tatccacagaatcaggggataacgcaggaaagaacatgtgagcaaaaggccagcaaaaggccaggaaccgtaaaaaggccgcgttgctggcgtttttccataggctccgcccccctgacgagcatcacaaaaatcgacgctcaagtcagaggtggcgaaacccgacaggactataaagataccaggcgtttccccctggaagctccctcgtgcgctctcctgttccgaccctgccgcttaccggatacctgtccgcctttctcccttcgggaagcgtggcgctttctcaatgctcacgctgtaggtatctcagttcggtgtaggtcgttcgctccaagctgggctgtgtgcacgaaccccccgttcagcccgaccgctgcgccttatccggtaactatcgtcttgagtccaacccggtaagacacgacttatcgccactggcagcagccactggtaacaggattagcagagcgaggtatgtaggcggtgctacagagttcttgaagtggtggcctaactacggctacactagaaggacagtatttggtatctgcgctctgctgaagccagttaccttcggaaaaagagttggtagctcttgatccggcaaacaaaccaccgctggtagcggtggtttttttgtttgcaagcagcagattacgcgcagaaaaaaaggatctcaagaagatcctttgatcttttctacggggtctgacgctcagtggaacgaaaactcacgttaagggattttggtcatgagattatcaaaaaggatcttcacctagatccttttaaattaaaaatgaagttttaaatcaatctaaagtatatatgagtaaacttggtctgacagttaccaatgcttaatcagtgaggcacctatctcagcgatctgtctatttcgttcatccatagttgcctgactccccgtcgtgtagataactacgatacgggagggcttaccatctggccccagtgctgcaatgataccgcgagacccacgctcaccggctccagatttatcagcaataaaccagccagccggaagggccgagcgcagaagtggtcctgcaactttatccgcctccatccagtctattaattgttgccgggaagctagagtaagtagttcgccagttaatagtttgcgcaacgttgttgccattgctacaggcatcgtggtgtcacgctcgtcgtttggtatggcttcattcagctccggttcccaacgatcaaggcgagttacatgatcccccatgttgtgcaaaaaagcggttagctccttcggtcctccgatcgttgtcagaagtaagttggccgcagtgttatcactcatggttatggcagcactgcataattctcttactgtcatgccatccgtaagatgcttttctgtgactggtgagtactcaaccaagtcattctgagaatagtgtatgcggcgaccgagttgctcttgcccggcgtcaatacgggataataccgcgccacatagcagaactttaaaagtgctcatcattggaaaacgttcttcggggcgaaaactctcaaggatcttaccgctgttgagatccagttcgatgtaacccactcgtgcacccaactgatcttcagcatcttttactttcaccagcgtttctgggtgagcaaaaacaggaaggcaaaatgccgcaaaaaagggaataagggcgacacggaaatgttgaatactcatactcttcctttttcaatattattgaagcatttatcagggttattgtctcatgagcggatacatatttgaatgtatttagaaaaataaacaaataggggttccgcgcacatttccccgaaaagtgccacctgacgtctaagaaaccattattatcatgacattaacctataaaaataggcgtatcacgaggccctttcgtctcgcgcgtttcggtgatgacggtgaaaacctctgacacatgcagctcccggagacggtcacagcttgtctgtaagcggatgccgggagcagacaagcccgtcagggcgcgtcagcgggtgttggcgggtgtcggggctggcttaactatgcggcatcagagcagattgtactgagagtgcaccatatgcggtgtgaaataccgcacagatgcgtaaggagaaaataccgcatcaggcgccattcgccattcaggctgcgcaactgttgggaagggcgatcggtgcgggcctcttcgctattacgccagctggcgaaagggggatgtgctgcaaggcgattaagttgggtaacgccagggttttcccagtcacgacgttgtaaaacgacggccagtgccaagctttgtttaaaatataacaaaattgtgatcccacaaaatgaagtggggcaaaatcaaataattaactagtgtccgtaaacttgttggtcttcaactttttgaggaacacgttggacggcaaatcgtgactataacacaagttgatttaataattttagccaacacgtcgggctgcgtgttttttgcgctctgtgtacacgttgattaactggtcgattaaataatttaatttttggttcttctttaaatctgtgatgaaattttttaaaataactttaaattcttcattggtaaaaaatgccacgttttgcaacttgtgagggtctaatatgaggtcaaactcagtaggagttttatccaaaaaagaaaacatgattacgtctgtacacgaacgcgtattaacgcagagtgcaaagtataagagggttaaaaaatatattttacgcaccatatacgcatcgggttgatatcgttaatatggatcaatttgaacagttgattaacgtgtctctgctcaagtctttgatcaaaacgcaaatcgacgaaaatgtgtcggacaatatcaagtcgatgagcgaaaaactaaaaaggctagaatacgacaatctcacagacagcgttgagatatacggtattcacgacagcaggctgaataataaaaaaattagaaactattatttaaccctagaaagataatcatattgtgacgtacgttaaagataatcatgcgtaaaattgacgcatgtgttttatcggtctgtatatcgaggtttatttattaatttgaatagatattaagttttattatatttacacttacatactaataataaattcaacaaacaatttatttatgtttatttatttattaaaaaaaaacaaaaactcaaaatttcttctataaagtaacaaaacttttaaacattctctcttttacaaaaataaacttattttgtactttaaaaacagtcatgttgtattataaaataagtaattagcttaacttatacataatagaaacaaattatacttattagtcagtcagaaacaactttggcacatatcaatattatgctctcgacaaataacttttttgcattttttgcacgatgcatttgcctttcgccttattttagaggggcagtaagtacagtaagtacgttttttcattactggctcttcagtactgtcatctgatgtaccaggcacttcatttggcaaaatattagagatattatcgcgcaaatatctcttcaaagtaggagcttctaaacgcttacgcataaacgatgacgtcaggctcatgtaaaggtttctcataaattttttgcgactttgaaccttttctcccttgctactgacattatggctgtatataataaaagaatttatgcaggcaatgtttatcattccgtacaataatgccataggccacctattcgtcttcctactgcaggtcatcacagaacacatttggtctagcgtgtccactccgcctttagtttgattataatacataaccatttgcggtttaccggtactttcgttgatagaagcatcctcatcacaagatgataataagtataccatcttagctggcttcggtttatatgagacgagagtaaggggtccgtcaaaacaaaacatcgatgttcccactggcctggagcgactgtttttcagtacttccggtatctcgcgtttgtttgatcgcacggttcccacaatggttaattcgagctcgcccggggtcctaggtttttgctcacctgtgattgctcctactcaaatacaaaaacatcaaattttctgtcaataaagcatatttatttatatttattttacaggaaagaattccttttaaagtgtattttaacctataatgaaaaacgattaaaaaaaatacataaaataattcgaaaatttttgaatagcccaggttgataaaaattcatttcatacgttttataacttatgcccctaagtattttttgaccatagtgtttcaattctacattaattttacagagtagaatgaaacgccacctactcagccaagaggcgaaaaggttagctcgccaagcagagagggcgccagtgctcactactttttataattctcaacttctttttccagactcagttcgtatatatagacctattttcaatttaacgtcgggcggcagcggcgggaatgggttttagagctagaaatagcaagttaaaataaggctagtccgttatcaacttgaaaaagtggcaccgagtcggtgcttttttttttgcctacctggagcctgagagttgttcaataaaataaaaatgtttcgtttttttgctttcgccagtatttattatttttcatcaatatgtattcaatttggtatgtatttagtaattgtaatatatagacaatggttttccgttgacgtacatacatctgacgtgtgtttatttagacataatagttatgttttcacatctttttaatgttcgcttaatgcgtatgcattctagacaattgtgctcggcaacagtatatttgtggtgtgccaaccaacaacctgcaggagctccagcttttgtaggcctccgttgtatgttgtagcgtctgtgaagcgtcctactcctaagcatgacttgaagcacaacttacctaagccatgacagcctcctgtcgtgtatcactgacagctcgactctctacgatatctaagctgatgctagcgaattcttttttgctcacctgtgattgctcctactcaaatacaaaaacatcaaattttctgtcaataaagcatatttatttatatttattttacaggaaagaattccttttaaagtgtattttaacctataatgaaaaacgattaaaaaaaatacataaaataattcgaaaatttttgaatagcccaggttgataaaaattcatttcatacgttttataacttatgcccctaagtattttttgaccatagtgtttcaattctacattaattttacagagtagaatgaaacgccacctactcagccaagaggcgaaaaggttagctcgccaagcagagagggcgccagtgctcactactttttataattctcaacttctttttccagactcagttcgtatatatagacctattttcaatttaacgtcgcaacctcaagttgtaccaaggttttagagctagaaatagcaagttaaaataaggctagtccgttatcaacttgaaaaagtggcaccgagtcggtgcttttttttttgcctacctggagcctgagagttgttcaataaaataaaaatgtttcgtttttttgctttcgccagtatttattatttttcatcaatatgtattcaatttggtatgtatttagtaattgtaatatatagacaatggttttccgttgacgtacatacatctgacgtgtgtttatttagacataatagttatgttttcacatctttttaatgttcgcttaatgcgtatgcattctagacaattgtgctcggcaacagtatatttgtggtgtgccaaccaacaacctgcaggagctccagcttttgtcttaagcatactcggtggcctccccaccaccaacttttttgcactgcaaaaaaacacgcttttgcacgcgggcccatacatagtacaaactctacgtttcgtagactattttacataaatagtctacaccgttgtatacgctccaaatacactaccacacattgaacctttttgcagtgcaaaaaagtacgtgtcggcagtcacgtaggccggccttatcgggtcgcgtcctgtcacgtacgaatcacattatcggaccggacgagtgttgtcttatcgtgacaggacgccagcttcctgtgttgctaaccgcagccggacgcaactccttatcggaacaggacgcgcctccatatcagccgcgcgttatctcatgcgcgtgaccggacacgaggcgcccgtcccgcttatcgcgcctataaatacagcccgcaacgatctggtaaacacagttgaacagcatctgttacagcgacacaacatgagccggtccaacaacgccaacgcgcccacgccatccaaccgccgccgcaacctgtctctggtgcaaaatgagcaagggcgaggagctgttcaccggggtggtgcccatcctggtcgagctggacggcgacgtaaacggccacaagttcagcgtgtccggcgagggcgagggcgatgccacctacggcaagctgaccctgaagttcatctgcaccaccggcaagctgcccgtgccctggcccaccctcgtgaccaccctgacctacggcgtgcagtgcttcagccgctaccccgaccacatgaagcagcacgacttcttcaagtccgccatgcccgaaggctacgtccaggagcgcaccatcttcttcaaggacgacggcaactacaagacccgcgccgaggtgaagttcgagggcgacaccctggtgaaccgcatcgagctgaagggcatcgacttcaaggaggacggcaacatcctggggcacaagctggagtacaactacaacagccacaacgtctatatcatggccgacaagcagaagaacggcatcaaggtgaacttcaagatccgccacaacatcgaggacggcagcgtgcagctcgccgaccactaccagcagaacacccccatcggcgacggccccgtgctgctgcccgacaaccactacctgagcacccagtccgccctgagcaaagaccccaacgagaagcgcgatcacatggtcctgctggagttcgtgaccgccgccgggatcactctcggcatggacgagctgtacaagtaagcggccgctagaatgaatcgtttttaaaataacaaatcaattgttttataatattcgtacgattctttgattatgtaataaaatgtgatcattaggaagattacgaaaaatataaaaaatatgagttctgtgtgtataacaaatgctgtaaacgccacaattgtgtttgttgcaaataaacccatgattatttgattaaaattgttgttttctttgttcatagacaatagtgtgttttgcctaaacgtgtactgcataaactccatgcgagtgtatagcgagctagtggctaacgcttgccccaccaaagtagattcgtcaaaatcctcaatttcatcaccctcctccaagtttaacatttggccgtcggaattaacttctaaagatgccacataatctaataaatgaaatagagattcaaacgtggcgtcatcgtccgtttcgaccatttccgaaaagaactcgggcataaactctatgatttctctggacgtggtgttgtcgaaactctcaaagtacgcagtcaggaacgtgcgcgacatgtcgtcgggaaactcgcgcggaaacatgttgttgtaaccgaacgggtcccatagcgccaaaaccaaatctgccagcgtcaatagaatgagcacgatgccgacaatggagctggcttggatagcgattcgagttaacggccggctcgaggaattcttttttgctcacctgtgattgctcctactcaaatacaaaaacatcaaattttctgtcaataaagcatatttatttatatttattttacaggaaagaattccttttaaagtgtattttaacctataatgaaaaacgattaaaaaaaatacataaaataattcgaaaatttttgaatagcccaggttgataaaaattcatttcatacgttttataacttatgcccctaagtattttttgaccatagtgtttcaattctacattaattttacagagtagaatgaaacgccacctactcagccaagaggcgaaaaggttagctcgccaagcagagagggcgccagtgctcactactttttataattctcaacttctttttccagactcagttcgtatatatagacctattttcaatttaacgtcgggattatccaaaactaagcagttttagagctagaaatagcaagttaaaataaggctagtccgttatcaacttgaaaaagtggcaccgagtcggtgcttttttttttgcctacctggagcctgagagttgttcaataaaataaaaatgtttcgtttttttgctttcgccagtatttattatttttcatcaatatgtattcaatttggtatgtatttagtaattgtaatatatagacaatggttttccgttgacgtacatacatctgacgtgtgtttatttagacataatagttatgttttcacatctttttaatgttcgcttaatgcgtatgcattctagacaattgtgctcggcaacagtatatttgtggtgtgccaaccaacaacctgcaggagctccagcttttgtgaggatctcggatctgacaatgttcagtgcagagactcggctacgcctcgtggactttgaagttgaccaacaatgtttattcttacctctaatagtcctctgtggcaaggtcaagattctgttagaagccaatgaagaacctggttgttcaataacattttgttcgtctaatatttcactaccgcttgacgttggctgcacttcatgtacctcatctataaacgcttcttctgtatcgctctggacgtcatcttcacttacgtgatctgatatttcactgtcagaatcctcaccaacaagctcgtcatcgctttgcagaagagcagagaggatatgctcatcgtctaaagaactacccattttattatatattagtcacgatatctataacaagaaaatatatatataataagttatcacgtaagtagaacatgaaataacaatataattatcgtatgagttaaatcttaaaagtcacgtaaaagataatcatgcgtcattttgactcacgcggtcgttatagttcaaaatcagtgacacttaccgcattgacaagcacgcctcacgggagctccaagcggcgactgagatgtcctaaatgcacagcgacggattcgcgctatttagaaagagagagcaatatttcaagaatgcatgcgtcaattttacgcagactatctttctagggttaaaaaagatttgcgctttactcgacctaaactttaaacacgtcatagaatcttcgtttgacaaaaaccacattgtggccaagctgtgtgacgcgacgcgcgctaaagaatggcaaaccaagtcgcgcgagcgtcgactctagaggatccccgggtaccgagctcgaattcgtaatcatggtcatagctgtttcctgtgtgaaattgttatccgctcacaattccacacaacatacgagccggaagcataaagtgtaaagcctggggtgcctaatgagtgagctaactcacattaattgcgttgcgctcactgcccgctttccagtcgggaaacctgtcgtgccagctgcattaatgaatcggccaacgcgcggggagaggcggtttgcgtattgggcgctcttccgcttcctcgctcactgactcgctgcgctcggtcgttcggctgcggcgagcggtatcagctcactcaaaggcggtaatacggt

SEQ ID NO: 19 - DNA, 9848 bp, Artificial Sequence
  pBac-[U6-gRNA-Slx]-[U6-gRNA-K81#1]-[Opie2-eGFP-p10]-[U6-gRNA-K81# 2]
tatccacagaatcaggggataacgcaggaaagaacatgtgagcaaaaggccagcaaaaggccaggaaccgtaaaaaggccgcgttgctggcgtttttccataggctccgcccccctgacgagcatcacaaaaatcgacgctcaagtcagaggtggcgaaacccgacaggactataaagataccaggcgtttccccctggaagctccctcgtgcgctctcctgttccgaccctgccgcttaccggatacctgtccgcctttctcccttcgggaagcgtggcgctttctcaatgctcacgctgtaggtatctcagttcggtgtaggtcgttcgctccaagctgggctgtgtgcacgaaccccccgttcagcccgaccgctgcgccttatccggtaactatcgtcttgagtccaacccggtaagacacgacttatcgccactggcagcagccactggtaacaggattagcagagcgaggtatgtaggcggtgctacagagttcttgaagtggtggcctaactacggctacactagaaggacagtatttggtatctgcgctctgctgaagccagttaccttcggaaaaagagttggtagctcttgatccggcaaacaaaccaccgctggtagcggtggtttttttgtttgcaagcagcagattacgcgcagaaaaaaaggatctcaagaagatcctttgatcttttctacggggtctgacgctcagtggaacgaaaactcacgttaagggattttggtcatgagattatcaaaaaggatcttcacctagatccttttaaattaaaaatgaagttttaaatcaatctaaagtatatatgagtaaacttggtctgacagttaccaatgcttaatcagtgaggcacctatctcagcgatctgtctatttcgttcatccatagttgcctgactccccgtcgtgtagataactacgatacgggagggcttaccatctggccccagtgctgcaatgataccgcgagacccacgctcaccggctccagatttatcagcaataaaccagccagccggaagggccgagcgcagaagtggtcctgcaactttatccgcctccatccagtctattaattgttgccgggaagctagagtaagtagttcgccagttaatagtttgcgcaacgttgttgccattgctacaggcatcgtggtgtcacgctcgtcgtttggtatggcttcattcagctccggttcccaacgatcaaggcgagttacatgatcccccatgttgtgcaaaaaagcggttagctccttcggtcctccgatcgttgtcagaagtaagttggccgcagtgttatcactcatggttatggcagcactgcataattctcttactgtcatgccatccgtaagatgcttttctgtgactggtgagtactcaaccaagtcattctgagaatagtgtatgcggcgaccgagttgctcttgcccggcgtcaatacgggataataccgcgccacatagcagaactttaaaagtgctcatcattggaaaacgttcttcggggcgaaaactctcaaggatcttaccgctgttgagatccagttcgatgtaacccactcgtgcacccaactgatcttcagcatcttttactttcaccagcgtttctgggtgagcaaaaacaggaaggcaaaatgccgcaaaaaagggaataagggcgacacggaaatgttgaatactcatactcttcctttttcaatattattgaagcatttatcagggttattgtctcatgagcggatacatatttgaatgtatttagaaaaataaacaaataggggttccgcgcacatttccccgaaaagtgccacctgacgtctaagaaaccattattatcatgacattaacctataaaaataggcgtatcacgaggccctttcgtctcgcgcgtttcggtgatgacggtgaaaacctctgacacatgcagctcccggagacggtcacagcttgtctgtaagcggatgccgggagcagacaagcccgtcagggcgcgtcagcgggtgttggcgggtgtcggggctggcttaactatgcggcatcagagcagattgtactgagagtgcaccatatgcggtgtgaaataccgcacagatgcgtaaggagaaaataccgcatcaggcgccattcgccattcaggctgcgcaactgttgggaagggcgatcggtgcgggcctcttcgctattacgccagctggcgaaagggggatgtgctgcaaggcgattaagttgggtaacgccagggttttcccagtcacgacgttgtaaaacgacggccagtgccaagctttgtttaaaatataacaaaattgtgatcccacaaaatgaagtggggcaaaatcaaataattaactagtgtccgtaaacttgttggtcttcaactttttgaggaacacgttggacggcaaatcgtgactataacacaagttgatttaataattttagccaacacgtcgggctgcgtgttttttgcgctctgtgtacacgttgattaactggtcgattaaataatttaatttttggttcttctttaaatctgtgatgaaattttttaaaataactttaaattcttcattggtaaaaaatgccacgttttgcaacttgtgagggtctaatatgaggtcaaactcagtaggagttttatccaaaaaagaaaacatgattacgtctgtacacgaacgcgtattaacgcagagtgcaaagtataagagggttaaaaaatatattttacgcaccatatacgcatcgggttgatatcgttaatatggatcaatttgaacagttgattaacgtgtctctgctcaagtctttgatcaaaacgcaaatcgacgaaaatgtgtcggacaatatcaagtcgatgagcgaaaaactaaaaaggctagaatacgacaatctcacagacagcgttgagatatacggtattcacgacagcaggctgaataataaaaaaattagaaactattatttaaccctagaaagataatcatattgtgacgtacgttaaagataatcatgcgtaaaattgacgcatgtgttttatcggtctgtatatcgaggtttatttattaatttgaatagatattaagttttattatatttacacttacatactaataataaattcaacaaacaatttatttatgtttatttatttattaaaaaaaaacaaaaactcaaaatttcttctataaagtaacaaaacttttaaacattctctcttttacaaaaataaacttattttgtactttaaaaacagtcatgttgtattataaaataagtaattagcttaacttatacataatagaaacaaattatacttattagtcagtcagaaacaactttggcacatatcaatattatgctctcgacaaataacttttttgcattttttgcacgatgcatttgcctttcgccttattttagaggggcagtaagtacagtaagtacgttttttcattactggctcttcagtactgtcatctgatgtaccaggcacttcatttggcaaaatattagagatattatcgcgcaaatatctcttcaaagtaggagcttctaaacgcttacgcataaacgatgacgtcaggctcatgtaaaggtttctcataaattttttgcgactttgaaccttttctcccttgctactgacattatggctgtatataataaaagaatttatgcaggcaatgtttatcattccgtacaataatgccataggccacctattcgtcttcctactgcaggtcatcacagaacacatttggtctagcgtgtccactccgcctttagtttgattataatacataaccatttgcggtttaccggtactttcgttgatagaagcatcctcatcacaagatgataataagtataccatcttagctggcttcggtttatatgagacgagagtaaggggtccgtcaaaacaaaacatcgatgttcccactggcctggagcgactgtttttcagtacttccggtatctcgcgtttgtttgatcgcacggttcccacaatggttaattcgagctcgcccggggtcctaggtttttgctcacctgtgattgctcctactcaaatacaaaaacatcaaattttctgtcaataaagcatatttatttatatttattttacaggaaagaattccttttaaagtgtattttaacctataatgaaaaacgattaaaaaaaatacataaaataattcgaaaatttttgaatagcccaggttgataaaaattcatttcatacgttttataacttatgcccctaagtattttttgaccatagtgtttcaattctacattaattttacagagtagaatgaaacgccacctactcagccaagaggcgaaaaggttagctcgccaagcagagagggcgccagtgctcactactttttataattctcaacttctttttccagactcagttcgtatatatagacctattttcaatttaacgtcgggcggcagcggcgggaatgggttttagagctagaaatagcaagttaaaataaggctagtccgttatcaacttgaaaaagtggcaccgagtcggtgcttttttttttgcctacctggagcctgagagttgttcaataaaataaaaatgtttcgtttttttgctttcgccagtatttattatttttcatcaatatgtattcaatttggtatgtatttagtaattgtaatatatagacaatggttttccgttgacgtacatacatctgacgtgtgtttatttagacataatagttatgttttcacatctttttaatgttcgcttaatgcgtatgcattctagacaattgtgctcggcaacagtatatttgtggtgtgccaaccaacaacctgcaggagctccagcttttgtaggcctccgttgtatgttgtagcgtctgtgaagcgtcctactcctaagcatgacttgaagcacaacttacctaagccatgacagcctcctgtcgtgtatcactgacagctcgactctctacgatatctaagctgatgctagcgaattcttttttgctcacctgtgattgctcctactcaaatacaaaaacatcaaattttctgtcaataaagcatatttatttatatttattttacaggaaagaattccttttaaagtgtattttaacctataatgaaaaacgattaaaaaaaatacataaaataattcgaaaatttttgaatagcccaggttgataaaaattcatttcatacgttttataacttatgcccctaagtattttttgaccatagtgtttcaattctacattaattttacagagtagaatgaaacgccacctactcagccaagaggcgaaaaggttagctcgccaagcagagagggcgccagtgctcactactttttataattctcaacttctttttccagactcagttcgtatatatagacctattttcaatttaacgtcggatcacagcgagttcttcgggttttagagctagaaatagcaagttaaaataaggctagtccgttatcaacttgaaaaagtggcaccgagtcggtgcttttttttttgcctacctggagcctgagagttgttcaataaaataaaaatgtttcgtttttttgctttcgccagtatttattatttttcatcaatatgtattcaatttggtatgtatttagtaattgtaatatatagacaatggttttccgttgacgtacatacatctgacgtgtgtttatttagacataatagttatgttttcacatctttttaatgttcgcttaatgcgtatgcattctagacaattgtgctcggcaacagtatatttgtggtgtgccaaccaacaacctgcaggagctccagcttttgtcttaagcatactcggtggcctccccaccaccaacttttttgcactgcaaaaaaacacgcttttgcacgcgggcccatacatagtacaaactctacgtttcgtagactattttacataaatagtctacaccgttgtatacgctccaaatacactaccacacattgaacctttttgcagtgcaaaaaagtacgtgtcggcagtcacgtaggccggccttatcgggtcgcgtcctgtcacgtacgaatcacattatcggaccggacgagtgttgtcttatcgtgacaggacgccagcttcctgtgttgctaaccgcagccggacgcaactccttatcggaacaggacgcgcctccatatcagccgcgcgttatctcatgcgcgtgaccggacacgaggcgcccgtcccgcttatcgcgcctataaatacagcccgcaacgatctggtaaacacagttgaacagcatctgttacagcgacacaacatgagccggtccaacaacgccaacgcgcccacgccatccaaccgccgccgcaacctgtctctggtgcaaaatgagcaagggcgaggagctgttcaccggggtggtgcccatcctggtcgagctggacggcgacgtaaacggccacaagttcagcgtgtccggcgagggcgagggcgatgccacctacggcaagctgaccctgaagttcatctgcaccaccggcaagctgcccgtgccctggcccaccctcgtgaccaccctgacctacggcgtgcagtgcttcagccgctaccccgaccacatgaagcagcacgacttcttcaagtccgccatgcccgaaggctacgtccaggagcgcaccatcttcttcaaggacgacggcaactacaagacccgcgccgaggtgaagttcgagggcgacaccctggtgaaccgcatcgagctgaagggcatcgacttcaaggaggacggcaacatcctggggcacaagctggagtacaactacaacagccacaacgtctatatcatggccgacaagcagaagaacggcatcaaggtgaacttcaagatccgccacaacatcgaggacggcagcgtgcagctcgccgaccactaccagcagaacacccccatcggcgacggccccgtgctgctgcccgacaaccactacctgagcacccagtccgccctgagcaaagaccccaacgagaagcgcgatcacatggtcctgctggagttcgtgaccgccgccgggatcactctcggcatggacgagctgtacaagtaagcggccgctagaatgaatcgtttttaaaataacaaatcaattgttttataatattcgtacgattctttgattatgtaataaaatgtgatcattaggaagattacgaaaaatataaaaaatatgagttctgtgtgtataacaaatgctgtaaacgccacaattgtgtttgttgcaaataaacccatgattatttgattaaaattgttgttttctttgttcatagacaatagtgtgttttgcctaaacgtgtactgcataaactccatgcgagtgtatagcgagctagtggctaacgcttgccccaccaaagtagattcgtcaaaatcctcaatttcatcaccctcctccaagtttaacatttggccgtcggaattaacttctaaagatgccacataatctaataaatgaaatagagattcaaacgtggcgtcatcgtccgtttcgaccatttccgaaaagaactcgggcataaactctatgatttctctggacgtggtgttgtcgaaactctcaaagtacgcagtcaggaacgtgcgcgacatgtcgtcgggaaactcgcgcggaaacatgttgttgtaaccgaacgggtcccatagcgccaaaaccaaatctgccagcgtcaatagaatgagcacgatgccgacaatggagctggcttggatagcgattcgagttaacggccggctcgaggaattcttttttgctcacctgtgattgctcctactcaaatacaaaaacatcaaattttctgtcaataaagcatatttatttatatttattttacaggaaagaattccttttaaagtgtattttaacctataatgaaaaacgattaaaaaaaatacataaaataattcgaaaatttttgaatagcccaggttgataaaaattcatttcatacgttttataacttatgcccctaagtattttttgaccatagtgtttcaattctacattaattttacagagtagaatgaaacgccacctactcagccaagaggcgaaaaggttagctcgccaagcagagagggcgccagtgctcactactttttataattctcaacttctttttccagactcagttcgtatatatagacctattttcaatttaacgtcgggagttggggtcgtcgacatgttttagagctagaaatagcaagttaaaataaggctagtccgttatcaacttgaaaaagtggcaccgagtcggtgcttttttttttgcctacctggagcctgagagttgttcaataaaataaaaatgtttcgtttttttgctttcgccagtatttattatttttcatcaatatgtattcaatttggtatgtatttagtaattgtaatatatagacaatggttttccgttgacgtacatacatctgacgtgtgtttatttagacataatagttatgttttcacatctttttaatgttcgcttaatgcgtatgcattctagacaattgtgctcggcaacagtatatttgtggtgtgccaaccaacaacctgcaggagctccagcttttgtgaggatctcggatctgacaatgttcagtgcagagactcggctacgcctcgtggactttgaagttgaccaacaatgtttattcttacctctaatagtcctctgtggcaaggtcaagattctgttagaagccaatgaagaacctggttgttcaataacattttgttcgtctaatatttcactaccgcttgacgttggctgcacttcatgtacctcatctataaacgcttcttctgtatcgctctggacgtcatcttcacttacgtgatctgatatttcactgtcagaatcctcaccaacaagctcgtcatcgctttgcagaagagcagagaggatatgctcatcgtctaaagaactacccattttattatatattagtcacgatatctataacaagaaaatatatatataataagttatcacgtaagtagaacatgaaataacaatataattatcgtatgagttaaatcttaaaagtcacgtaaaagataatcatgcgtcattttgactcacgcggtcgttatagttcaaaatcagtgacacttaccgcattgacaagcacgcctcacgggagctccaagcggcgactgagatgtcctaaatgcacagcgacggattcgcgctatttagaaagagagagcaatatttcaagaatgcatgcgtcaattttacgcagactatctttctagggttaaaaaagatttgcgctttactcgacctaaactttaaacacgtcatagaatcttcgtttgacaaaaaccacattgtggccaagctgtgtgacgcgacgcgcgctaaagaatggcaaaccaagtcgcgcgagcgtcgactctagaggatccccgggtaccgagctcgaattcgtaatcatggtcatagctgtttcctgtgtgaaattgttatccgctcacaattccacacaacatacgagccggaagcataaagtgtaaagcctggggtgcctaatgagtgagctaactcacattaattgcgttgcgctcactgcccgctttccagtcgggaaacctgtcgtgccagctgcattaatgaatcggccaacgcgcggggagaggcggtttgcgtattgggcgctcttccgcttcctcgctcactgactcgctgcgctcggtcgttcggctgcggcgagcggtatcagctcactcaaaggcggtaatacggt

SEQ ID NO: 20 - DNA, 9848 bp, Artificial Sequence
  pBac-[U6-gRNA-Slx]-[U6-gRNA-Mfr#1]-[Opie2-eGFP-p10]-[U6-gRNA-Mfr# 2]
tatccacagaatcaggggataacgcaggaaagaacatgtgagcaaaaggccagcaaaaggccaggaaccgtaaaaaggccgcgttgctggcgtttttccataggctccgcccccctgacgagcatcacaaaaatcgacgctcaagtcagaggtggcgaaacccgacaggactataaagataccaggcgtttccccctggaagctccctcgtgcgctctcctgttccgaccctgccgcttaccggatacctgtccgcctttctcccttcgggaagcgtggcgctttctcaatgctcacgctgtaggtatctcagttcggtgtaggtcgttcgctccaagctgggctgtgtgcacgaaccccccgttcagcccgaccgctgcgccttatccggtaactatcgtcttgagtccaacccggtaagacacgacttatcgccactggcagcagccactggtaacaggattagcagagcgaggtatgtaggcggtgctacagagttcttgaagtggtggcctaactacggctacactagaaggacagtatttggtatctgcgctctgctgaagccagttaccttcggaaaaagagttggtagctcttgatccggcaaacaaaccaccgctggtagcggtggtttttttgtttgcaagcagcagattacgcgcagaaaaaaaggatctcaagaagatcctttgatcttttctacggggtctgacgctcagtggaacgaaaactcacgttaagggattttggtcatgagattatcaaaaaggatcttcacctagatccttttaaattaaaaatgaagttttaaatcaatctaaagtatatatgagtaaacttggtctgacagttaccaatgcttaatcagtgaggcacctatctcagcgatctgtctatttcgttcatccatagttgcctgactccccgtcgtgtagataactacgatacgggagggcttaccatctggccccagtgctgcaatgataccgcgagacccacgctcaccggctccagatttatcagcaataaaccagccagccggaagggccgagcgcagaagtggtcctgcaactttatccgcctccatccagtctattaattgttgccgggaagctagagtaagtagttcgccagttaatagtttgcgcaacgttgttgccattgctacaggcatcgtggtgtcacgctcgtcgtttggtatggcttcattcagctccggttcccaacgatcaaggcgagttacatgatcccccatgttgtgcaaaaaagcggttagctccttcggtcctccgatcgttgtcagaagtaagttggccgcagtgttatcactcatggttatggcagcactgcataattctcttactgtcatgccatccgtaagatgcttttctgtgactggtgagtactcaaccaagtcattctgagaatagtgtatgcggcgaccgagttgctcttgcccggcgtcaatacgggataataccgcgccacatagcagaactttaaaagtgctcatcattggaaaacgttcttcggggcgaaaactctcaaggatcttaccgctgttgagatccagttcgatgtaacccactcgtgcacccaactgatcttcagcatcttttactttcaccagcgtttctgggtgagcaaaaacaggaaggcaaaatgccgcaaaaaagggaataagggcgacacggaaatgttgaatactcatactcttcctttttcaatattattgaagcatttatcagggttattgtctcatgagcggatacatatttgaatgtatttagaaaaataaacaaataggggttccgcgcacatttccccgaaaagtgccacctgacgtctaagaaaccattattatcatgacattaacctataaaaataggcgtatcacgaggccctttcgtctcgcgcgtttcggtgatgacggtgaaaacctctgacacatgcagctcccggagacggtcacagcttgtctgtaagcggatgccgggagcagacaagcccgtcagggcgcgtcagcgggtgttggcgggtgtcggggctggcttaactatgcggcatcagagcagattgtactgagagtgcaccatatgcggtgtgaaataccgcacagatgcgtaaggagaaaataccgcatcaggcgccattcgccattcaggctgcgcaactgttgggaagggcgatcggtgcgggcctcttcgctattacgccagctggcgaaagggggatgtgctgcaaggcgattaagttgggtaacgccagggttttcccagtcacgacgttgtaaaacgacggccagtgccaagctttgtttaaaatataacaaaattgtgatcccacaaaatgaagtggggcaaaatcaaataattaactagtgtccgtaaacttgttggtcttcaactttttgaggaacacgttggacggcaaatcgtgactataacacaagttgatttaataattttagccaacacgtcgggctgcgtgttttttgcgctctgtgtacacgttgattaactggtcgattaaataatttaatttttggttcttctttaaatctgtgatgaaattttttaaaataactttaaattcttcattggtaaaaaatgccacgttttgcaacttgtgagggtctaatatgaggtcaaactcagtaggagttttatccaaaaaagaaaacatgattacgtctgtacacgaacgcgtattaacgcagagtgcaaagtataagagggttaaaaaatatattttacgcaccatatacgcatcgggttgatatcgttaatatggatcaatttgaacagttgattaacgtgtctctgctcaagtctttgatcaaaacgcaaatcgacgaaaatgtgtcggacaatatcaagtcgatgagcgaaaaactaaaaaggctagaatacgacaatctcacagacagcgttgagatatacggtattcacgacagcaggctgaataataaaaaaattagaaactattatttaaccctagaaagataatcatattgtgacgtacgttaaagataatcatgcgtaaaattgacgcatgtgttttatcggtctgtatatcgaggtttatttattaatttgaatagatattaagttttattatatttacacttacatactaataataaattcaacaaacaatttatttatgtttatttatttattaaaaaaaaacaaaaactcaaaatttcttctataaagtaacaaaacttttaaacattctctcttttacaaaaataaacttattttgtactttaaaaacagtcatgttgtattataaaataagtaattagcttaacttatacataatagaaacaaattatacttattagtcagtcagaaacaactttggcacatatcaatattatgctctcgacaaataacttttttgcattttttgcacgatgcatttgcctttcgccttattttagaggggcagtaagtacagtaagtacgttttttcattactggctcttcagtactgtcatctgatgtaccaggcacttcatttggcaaaatattagagatattatcgcgcaaatatctcttcaaagtaggagcttctaaacgcttacgcataaacgatgacgtcaggctcatgtaaaggtttctcataaattttttgcgactttgaaccttttctcccttgctactgacattatggctgtatataataaaagaatttatgcaggcaatgtttatcattccgtacaataatgccataggccacctattcgtcttcctactgcaggtcatcacagaacacatttggtctagcgtgtccactccgcctttagtttgattataatacataaccatttgcggtttaccggtactttcgttgatagaagcatcctcatcacaagatgataataagtataccatcttagctggcttcggtttatatgagacgagagtaaggggtccgtcaaaacaaaacatcgatgttcccactggcctggagcgactgtttttcagtacttccggtatctcgcgtttgtttgatcgcacggttcccacaatggttaattcgagctcgcccggggtcctaggtttttgctcacctgtgattgctcctactcaaatacaaaaacatcaaattttctgtcaataaagcatatttatttatatttattttacaggaaagaattccttttaaagtgtattttaacctataatgaaaaacgattaaaaaaaatacataaaataattcgaaaatttttgaatagcccaggttgataaaaattcatttcatacgttttataacttatgcccctaagtattttttgaccatagtgtttcaattctacattaattttacagagtagaatgaaacgccacctactcagccaagaggcgaaaaggttagctcgccaagcagagagggcgccagtgctcactactttttataattctcaacttctttttccagactcagttcgtatatatagacctattttcaatttaacgtcgggcggcagcggcgggaatgggttttagagctagaaatagcaagttaaaataaggctagtccgttatcaacttgaaaaagtggcaccgagtcggtgcttttttttttgcctacctggagcctgagagttgttcaataaaataaaaatgtttcgtttttttgctttcgccagtatttattatttttcatcaatatgtattcaatttggtatgtatttagtaattgtaatatatagacaatggttttccgttgacgtacatacatctgacgtgtgtttatttagacataatagttatgttttcacatctttttaatgttcgcttaatgcgtatgcattctagacaattgtgctcggcaacagtatatttgtggtgtgccaaccaacaacctgcaggagctccagcttttgtaggcctccgttgtatgttgtagcgtctgtgaagcgtcctactcctaagcatgacttgaagcacaacttacctaagccatgacagcctcctgtcgtgtatcactgacagctcgactctctacgatatctaagctgatgctagcgaattcttttttgctcacctgtgattgctcctactcaaatacaaaaacatcaaattttctgtcaataaagcatatttatttatatttattttacaggaaagaattccttttaaagtgtattttaacctataatgaaaaacgattaaaaaaaatacataaaataattcgaaaatttttgaatagcccaggttgataaaaattcatttcatacgttttataacttatgcccctaagtattttttgaccatagtgtttcaattctacattaattttacagagtagaatgaaacgccacctactcagccaagaggcgaaaaggttagctcgccaagcagagagggcgccagtgctcactactttttataattctcaacttctttttccagactcagttcgtatatatagacctattttcaatttaacgtcgggcgtcaagttcaagaagcagttttagagctagaaatagcaagttaaaataaggctagtccgttatcaacttgaaaaagtggcaccgagtcggtgcttttttttttgcctacctggagcctgagagttgttcaataaaataaaaatgtttcgtttttttgctttcgccagtatttattatttttcatcaatatgtattcaatttggtatgtatttagtaattgtaatatatagacaatggttttccgttgacgtacatacatctgacgtgtgtttatttagacataatagttatgttttcacatctttttaatgttcgcttaatgcgtatgcattctagacaattgtgctcggcaacagtatatttgtggtgtgccaaccaacaacctgcaggagctccagcttttgtcttaagcatactcggtggcctccccaccaccaacttttttgcactgcaaaaaaacacgcttttgcacgcgggcccatacatagtacaaactctacgtttcgtagactattttacataaatagtctacaccgttgtatacgctccaaatacactaccacacattgaacctttttgcagtgcaaaaaagtacgtgtcggcagtcacgtaggccggccttatcgggtcgcgtcctgtcacgtacgaatcacattatcggaccggacgagtgttgtcttatcgtgacaggacgccagcttcctgtgttgctaaccgcagccggacgcaactccttatcggaacaggacgcgcctccatatcagccgcgcgttatctcatgcgcgtgaccggacacgaggcgcccgtcccgcttatcgcgcctataaatacagcccgcaacgatctggtaaacacagttgaacagcatctgttacagcgacacaacatgagccggtccaacaacgccaacgcgcccacgccatccaaccgccgccgcaacctgtctctggtgcaaaatgagcaagggcgaggagctgttcaccggggtggtgcccatcctggtcgagctggacggcgacgtaaacggccacaagttcagcgtgtccggcgagggcgagggcgatgccacctacggcaagctgaccctgaagttcatctgcaccaccggcaagctgcccgtgccctggcccaccctcgtgaccaccctgacctacggcgtgcagtgcttcagccgctaccccgaccacatgaagcagcacgacttcttcaagtccgccatgcccgaaggctacgtccaggagcgcaccatcttcttcaaggacgacggcaactacaagacccgcgccgaggtgaagttcgagggcgacaccctggtgaaccgcatcgagctgaagggcatcgacttcaaggaggacggcaacatcctggggcacaagctggagtacaactacaacagccacaacgtctatatcatggccgacaagcagaagaacggcatcaaggtgaacttcaagatccgccacaacatcgaggacggcagcgtgcagctcgccgaccactaccagcagaacacccccatcggcgacggccccgtgctgctgcccgacaaccactacctgagcacccagtccgccctgagcaaagaccccaacgagaagcgcgatcacatggtcctgctggagttcgtgaccgccgccgggatcactctcggcatggacgagctgtacaagtaagcggccgctagaatgaatcgtttttaaaataacaaatcaattgttttataatattcgtacgattctttgattatgtaataaaatgtgatcattaggaagattacgaaaaatataaaaaatatgagttctgtgtgtataacaaatgctgtaaacgccacaattgtgtttgttgcaaataaacccatgattatttgattaaaattgttgttttctttgttcatagacaatagtgtgttttgcctaaacgtgtactgcataaactccatgcgagtgtatagcgagctagtggctaacgcttgccccaccaaagtagattcgtcaaaatcctcaatttcatcaccctcctccaagtttaacatttggccgtcggaattaacttctaaagatgccacataatctaataaatgaaatagagattcaaacgtggcgtcatcgtccgtttcgaccatttccgaaaagaactcgggcataaactctatgatttctctggacgtggtgttgtcgaaactctcaaagtacgcagtcaggaacgtgcgcgacatgtcgtcgggaaactcgcgcggaaacatgttgttgtaaccgaacgggtcccatagcgccaaaaccaaatctgccagcgtcaatagaatgagcacgatgccgacaatggagctggcttggatagcgattcgagttaacggccggctcgaggaattcttttttgctcacctgtgattgctcctactcaaatacaaaaacatcaaattttctgtcaataaagcatatttatttatatttattttacaggaaagaattccttttaaagtgtattttaacctataatgaaaaacgattaaaaaaaatacataaaataattcgaaaatttttgaatagcccaggttgataaaaattcatttcatacgttttataacttatgcccctaagtattttttgaccatagtgtttcaattctacattaattttacagagtagaatgaaacgccacctactcagccaagaggcgaaaaggttagctcgccaagcagagagggcgccagtgctcactactttttataattctcaacttctttttccagactcagttcgtatatatagacctattttcaatttaacgtcggagaacgggacactggcagggttttagagctagaaatagcaagttaaaataaggctagtccgttatcaacttgaaaaagtggcaccgagtcggtgcttttttttttgcctacctggagcctgagagttgttcaataaaataaaaatgtttcgtttttttgctttcgccagtatttattatttttcatcaatatgtattcaatttggtatgtatttagtaattgtaatatatagacaatggttttccgttgacgtacatacatctgacgtgtgtttatttagacataatagttatgttttcacatctttttaatgttcgcttaatgcgtatgcattctagacaattgtgctcggcaacagtatatttgtggtgtgccaaccaacaacctgcaggagctccagcttttgtgaggatctcggatctgacaatgttcagtgcagagactcggctacgcctcgtggactttgaagttgaccaacaatgtttattcttacctctaatagtcctctgtggcaaggtcaagattctgttagaagccaatgaagaacctggttgttcaataacattttgttcgtctaatatttcactaccgcttgacgttggctgcacttcatgtacctcatctataaacgcttcttctgtatcgctctggacgtcatcttcacttacgtgatctgatatttcactgtcagaatcctcaccaacaagctcgtcatcgctttgcagaagagcagagaggatatgctcatcgtctaaagaactacccattttattatatattagtcacgatatctataacaagaaaatatatatataataagttatcacgtaagtagaacatgaaataacaatataattatcgtatgagttaaatcttaaaagtcacgtaaaagataatcatgcgtcattttgactcacgcggtcgttatagttcaaaatcagtgacacttaccgcattgacaagcacgcctcacgggagctccaagcggcgactgagatgtcctaaatgcacagcgacggattcgcgctatttagaaagagagagcaatatttcaagaatgcatgcgtcaattttacgcagactatctttctagggttaaaaaagatttgcgctttactcgacctaaactttaaacacgtcatagaatcttcgtttgacaaaaaccacattgtggccaagctgtgtgacgcgacgcgcgctaaagaatggcaaaccaagtcgcgcgagcgtcgactctagaggatccccgggtaccgagctcgaattcgtaatcatggtcatagctgtttcctgtgtgaaattgttatccgctcacaattccacacaacatacgagccggaagcataaagtgtaaagcctggggtgcctaatgagtgagctaactcacattaattgcgttgcgctcactgcccgctttccagtcgggaaacctgtcgtgccagctgcattaatgaatcggccaacgcgcggggagaggcggtttgcgtattgggcgctcttccgcttcctcgctcactgactcgctgcgctcggtcgttcggctgcggcgagcggtatcagctcactcaaaggcggtaatacggt

SEQ ID NO: 21 - DNA, 9848 bp, Artificial Sequence
  pBac-[U6-gRNA-Slx]-[U6-gRNA-Snky#1]-[Opie2-eGFP-p10]-[U6-gRNA-Snk y#2]
tatccacagaatcaggggataacgcaggaaagaacatgtgagcaaaaggccagcaaaaggccaggaaccgtaaaaaggccgcgttgctggcgtttttccataggctccgcccccctgacgagcatcacaaaaatcgacgctcaagtcagaggtggcgaaacccgacaggactataaagataccaggcgtttccccctggaagctccctcgtgcgctctcctgttccgaccctgccgcttaccggatacctgtccgcctttctcccttcgggaagcgtggcgctttctcaatgctcacgctgtaggtatctcagttcggtgtaggtcgttcgctccaagctgggctgtgtgcacgaaccccccgttcagcccgaccgctgcgccttatccggtaactatcgtcttgagtccaacccggtaagacacgacttatcgccactggcagcagccactggtaacaggattagcagagcgaggtatgtaggcggtgctacagagttcttgaagtggtggcctaactacggctacactagaaggacagtatttggtatctgcgctctgctgaagccagttaccttcggaaaaagagttggtagctcttgatccggcaaacaaaccaccgctggtagcggtggtttttttgtttgcaagcagcagattacgcgcagaaaaaaaggatctcaagaagatcctttgatcttttctacggggtctgacgctcagtggaacgaaaactcacgttaagggattttggtcatgagattatcaaaaaggatcttcacctagatccttttaaattaaaaatgaagttttaaatcaatctaaagtatatatgagtaaacttggtctgacagttaccaatgcttaatcagtgaggcacctatctcagcgatctgtctatttcgttcatccatagttgcctgactccccgtcgtgtagataactacgatacgggagggcttaccatctggccccagtgctgcaatgataccgcgagacccacgctcaccggctccagatttatcagcaataaaccagccagccggaagggccgagcgcagaagtggtcctgcaactttatccgcctccatccagtctattaattgttgccgggaagctagagtaagtagttcgccagttaatagtttgcgcaacgttgttgccattgctacaggcatcgtggtgtcacgctcgtcgtttggtatggcttcattcagctccggttcccaacgatcaaggcgagttacatgatcccccatgttgtgcaaaaaagcggttagctccttcggtcctccgatcgttgtcagaagtaagttggccgcagtgttatcactcatggttatggcagcactgcataattctcttactgtcatgccatccgtaagatgcttttctgtgactggtgagtactcaaccaagtcattctgagaatagtgtatgcggcgaccgagttgctcttgcccggcgtcaatacgggataataccgcgccacatagcagaactttaaaagtgctcatcattggaaaacgttcttcggggcgaaaactctcaaggatcttaccgctgttgagatccagttcgatgtaacccactcgtgcacccaactgatcttcagcatcttttactttcaccagcgtttctgggtgagcaaaaacaggaaggcaaaatgccgcaaaaaagggaataagggcgacacggaaatgttgaatactcatactcttcctttttcaatattattgaagcatttatcagggttattgtctcatgagcggatacatatttgaatgtatttagaaaaataaacaaataggggttccgcgcacatttccccgaaaagtgccacctgacgtctaagaaaccattattatcatgacattaacctataaaaataggcgtatcacgaggccctttcgtctcgcgcgtttcggtgatgacggtgaaaacctctgacacatgcagctcccggagacggtcacagcttgtctgtaagcggatgccgggagcagacaagcccgtcagggcgcgtcagcgggtgttggcgggtgtcggggctggcttaactatgcggcatcagagcagattgtactgagagtgcaccatatgcggtgtgaaataccgcacagatgcgtaaggagaaaataccgcatcaggcgccattcgccattcaggctgcgcaactgttgggaagggcgatcggtgcgggcctcttcgctattacgccagctggcgaaagggggatgtgctgcaaggcgattaagttgggtaacgccagggttttcccagtcacgacgttgtaaaacgacggccagtgccaagctttgtttaaaatataacaaaattgtgatcccacaaaatgaagtggggcaaaatcaaataattaactagtgtccgtaaacttgttggtcttcaactttttgaggaacacgttggacggcaaatcgtgactataacacaagttgatttaataattttagccaacacgtcgggctgcgtgttttttgcgctctgtgtacacgttgattaactggtcgattaaataatttaatttttggttcttctttaaatctgtgatgaaattttttaaaataactttaaattcttcattggtaaaaaatgccacgttttgcaacttgtgagggtctaatatgaggtcaaactcagtaggagttttatccaaaaaagaaaacatgattacgtctgtacacgaacgcgtattaacgcagagtgcaaagtataagagggttaaaaaatatattttacgcaccatatacgcatcgggttgatatcgttaatatggatcaatttgaacagttgattaacgtgtctctgctcaagtctttgatcaaaacgcaaatcgacgaaaatgtgtcggacaatatcaagtcgatgagcgaaaaactaaaaaggctagaatacgacaatctcacagacagcgttgagatatacggtattcacgacagcaggctgaataataaaaaaattagaaactattatttaaccctagaaagataatcatattgtgacgtacgttaaagataatcatgcgtaaaattgacgcatgtgttttatcggtctgtatatcgaggtttatttattaatttgaatagatattaagttttattatatttacacttacatactaataataaattcaacaaacaatttatttatgtttatttatttattaaaaaaaaacaaaaactcaaaatttcttctataaagtaacaaaacttttaaacattctctcttttacaaaaataaacttattttgtactttaaaaacagtcatgttgtattataaaataagtaattagcttaacttatacataatagaaacaaattatacttattagtcagtcagaaacaactttggcacatatcaatattatgctctcgacaaataacttttttgcattttttgcacgatgcatttgcctttcgccttattttagaggggcagtaagtacagtaagtacgttttttcattactggctcttcagtactgtcatctgatgtaccaggcacttcatttggcaaaatattagagatattatcgcgcaaatatctcttcaaagtaggagcttctaaacgcttacgcataaacgatgacgtcaggctcatgtaaaggtttctcataaattttttgcgactttgaaccttttctcccttgctactgacattatggctgtatataataaaagaatttatgcaggcaatgtttatcattccgtacaataatgccataggccacctattcgtcttcctactgcaggtcatcacagaacacatttggtctagcgtgtccactccgcctttagtttgattataatacataaccatttgcggtttaccggtactttcgttgatagaagcatcctcatcacaagatgataataagtataccatcttagctggcttcggtttatatgagacgagagtaaggggtccgtcaaaacaaaacatcgatgttcccactggcctggagcgactgtttttcagtacttccggtatctcgcgtttgtttgatcgcacggttcccacaatggttaattcgagctcgcccggggtcctaggtttttgctcacctgtgattgctcctactcaaatacaaaaacatcaaattttctgtcaataaagcatatttatttatatttattttacaggaaagaattccttttaaagtgtattttaacctataatgaaaaacgattaaaaaaaatacataaaataattcgaaaatttttgaatagcccaggttgataaaaattcatttcatacgttttataacttatgcccctaagtattttttgaccatagtgtttcaattctacattaattttacagagtagaatgaaacgccacctactcagccaagaggcgaaaaggttagctcgccaagcagagagggcgccagtgctcactactttttataattctcaacttctttttccagactcagttcgtatatatagacctattttcaatttaacgtcgggcggcagcggcgggaatgggttttagagctagaaatagcaagttaaaataaggctagtccgttatcaacttgaaaaagtggcaccgagtcggtgcttttttttttgcctacctggagcctgagagttgttcaataaaataaaaatgtttcgtttttttgctttcgccagtatttattatttttcatcaatatgtattcaatttggtatgtatttagtaattgtaatatatagacaatggttttccgttgacgtacatacatctgacgtgtgtttatttagacataatagttatgttttcacatctttttaatgttcgcttaatgcgtatgcattctagacaattgtgctcggcaacagtatatttgtggtgtgccaaccaacaacctgcaggagctccagcttttgtaggcctccgttgtatgttgtagcgtctgtgaagcgtcctactcctaagcatgacttgaagcacaacttacctaagccatgacagcctcctgtcgtgtatcactgacagctcgactctctacgatatctaagctgatgctagcgaattcttttttgctcacctgtgattgctcctactcaaatacaaaaacatcaaattttctgtcaataaagcatatttatttatatttattttacaggaaagaattccttttaaagtgtattttaacctataatgaaaaacgattaaaaaaaatacataaaataattcgaaaatttttgaatagcccaggttgataaaaattcatttcatacgttttataacttatgcccctaagtattttttgaccatagtgtttcaattctacattaattttacagagtagaatgaaacgccacctactcagccaagaggcgaaaaggttagctcgccaagcagagagggcgccagtgctcactactttttataattctcaacttctttttccagactcagttcgtatatatagacctattttcaatttaacgtcggacttctcgtaggtgcgcaagttttagagctagaaatagcaagttaaaataaggctagtccgttatcaacttgaaaaagtggcaccgagtcggtgcttttttttttgcctacctggagcctgagagttgttcaataaaataaaaatgtttcgtttttttgctttcgccagtatttattatttttcatcaatatgtattcaatttggtatgtatttagtaattgtaatatatagacaatggttttccgttgacgtacatacatctgacgtgtgtttatttagacataatagttatgttttcacatctttttaatgttcgcttaatgcgtatgcattctagacaattgtgctcggcaacagtatatttgtggtgtgccaaccaacaacctgcaggagctccagcttttgtcttaagcatactcggtggcctccccaccaccaacttttttgcactgcaaaaaaacacgcttttgcacgcgggcccatacatagtacaaactctacgtttcgtagactattttacataaatagtctacaccgttgtatacgctccaaatacactaccacacattgaacctttttgcagtgcaaaaaagtacgtgtcggcagtcacgtaggccggccttatcgggtcgcgtcctgtcacgtacgaatcacattatcggaccggacgagtgttgtcttatcgtgacaggacgccagcttcctgtgttgctaaccgcagccggacgcaactccttatcggaacaggacgcgcctccatatcagccgcgcgttatctcatgcgcgtgaccggacacgaggcgcccgtcccgcttatcgcgcctataaatacagcccgcaacgatctggtaaacacagttgaacagcatctgttacagcgacacaacatgagccggtccaacaacgccaacgcgcccacgccatccaaccgccgccgcaacctgtctctggtgcaaaatgagcaagggcgaggagctgttcaccggggtggtgcccatcctggtcgagctggacggcgacgtaaacggccacaagttcagcgtgtccggcgagggcgagggcgatgccacctacggcaagctgaccctgaagttcatctgcaccaccggcaagctgcccgtgccctggcccaccctcgtgaccaccctgacctacggcgtgcagtgcttcagccgctaccccgaccacatgaagcagcacgacttcttcaagtccgccatgcccgaaggctacgtccaggagcgcaccatcttcttcaaggacgacggcaactacaagacccgcgccgaggtgaagttcgagggcgacaccctggtgaaccgcatcgagctgaagggcatcgacttcaaggaggacggcaacatcctggggcacaagctggagtacaactacaacagccacaacgtctatatcatggccgacaagcagaagaacggcatcaaggtgaacttcaagatccgccacaacatcgaggacggcagcgtgcagctcgccgaccactaccagcagaacacccccatcggcgacggccccgtgctgctgcccgacaaccactacctgagcacccagtccgccctgagcaaagaccccaacgagaagcgcgatcacatggtcctgctggagttcgtgaccgccgccgggatcactctcggcatggacgagctgtacaagtaagcggccgctagaatgaatcgtttttaaaataacaaatcaattgttttataatattcgtacgattctttgattatgtaataaaatgtgatcattaggaagattacgaaaaatataaaaaatatgagttctgtgtgtataacaaatgctgtaaacgccacaattgtgtttgttgcaaataaacccatgattatttgattaaaattgttgttttctttgttcatagacaatagtgtgttttgcctaaacgtgtactgcataaactccatgcgagtgtatagcgagctagtggctaacgcttgccccaccaaagtagattcgtcaaaatcctcaatttcatcaccctcctccaagtttaacatttggccgtcggaattaacttctaaagatgccacataatctaataaatgaaatagagattcaaacgtggcgtcatcgtccgtttcgaccatttccgaaaagaactcgggcataaactctatgatttctctggacgtggtgttgtcgaaactctcaaagtacgcagtcaggaacgtgcgcgacatgtcgtcgggaaactcgcgcggaaacatgttgttgtaaccgaacgggtcccatagcgccaaaaccaaatctgccagcgtcaatagaatgagcacgatgccgacaatggagctggcttggatagcgattcgagttaacggccggctcgaggaattcttttttgctcacctgtgattgctcctactcaaatacaaaaacatcaaattttctgtcaataaagcatatttatttatatttattttacaggaaagaattccttttaaagtgtattttaacctataatgaaaaacgattaaaaaaaatacataaaataattcgaaaatttttgaatagcccaggttgataaaaattcatttcatacgttttataacttatgcccctaagtattttttgaccatagtgtttcaattctacattaattttacagagtagaatgaaacgccacctactcagccaagaggcgaaaaggttagctcgccaagcagagagggcgccagtgctcactactttttataattctcaacttctttttccagactcagttcgtatatatagacctattttcaatttaacgtcggtaggtgcgcaatggtaagagttttagagctagaaatagcaagttaaaataaggctagtccgttatcaacttgaaaaagtggcaccgagtcggtgcttttttttttgcctacctggagcctgagagttgttcaataaaataaaaatgtttcgtttttttgctttcgccagtatttattatttttcatcaatatgtattcaatttggtatgtatttagtaattgtaatatatagacaatggttttccgttgacgtacatacatctgacgtgtgtttatttagacataatagttatgttttcacatctttttaatgttcgcttaatgcgtatgcattctagacaattgtgctcggcaacagtatatttgtggtgtgccaaccaacaacctgcaggagctccagcttttgtgaggatctcggatctgacaatgttcagtgcagagactcggctacgcctcgtggactttgaagttgaccaacaatgtttattcttacctctaatagtcctctgtggcaaggtcaagattctgttagaagccaatgaagaacctggttgttcaataacattttgttcgtctaatatttcactaccgcttgacgttggctgcacttcatgtacctcatctataaacgcttcttctgtatcgctctggacgtcatcttcacttacgtgatctgatatttcactgtcagaatcctcaccaacaagctcgtcatcgctttgcagaagagcagagaggatatgctcatcgtctaaagaactacccattttattatatattagtcacgatatctataacaagaaaatatatatataataagttatcacgtaagtagaacatgaaataacaatataattatcgtatgagttaaatcttaaaagtcacgtaaaagataatcatgcgtcattttgactcacgcggtcgttatagttcaaaatcagtgacacttaccgcattgacaagcacgcctcacgggagctccaagcggcgactgagatgtcctaaatgcacagcgacggattcgcgctatttagaaagagagagcaatatttcaagaatgcatgcgtcaattttacgcagactatctttctagggttaaaaaagatttgcgctttactcgacctaaactttaaacacgtcatagaatcttcgtttgacaaaaaccacattgtggccaagctgtgtgacgcgacgcgcgctaaagaatggcaaaccaagtcgcgcgagcgtcgactctagaggatccccgggtaccgagctcgaattcgtaatcatggtcatagctgtttcctgtgtgaaattgttatccgctcacaattccacacaacatacgagccggaagcataaagtgtaaagcctggggtgcctaatgagtgagctaactcacattaattgcgttgcgctcactgcccgctttccagtcgggaaacctgtcgtgccagctgcattaatgaatcggccaacgcgcggggagaggcggtttgcgtattgggcgctcttccgcttcctcgctcactgactcgctgcgctcggtcgttcggctgcggcgagcggtatcagctcactcaaaggcggtaatacggt

SEQ ID NO: 22 - DNA, 14887 bp, Artificial Sequence
  pBac-AAEL010097-Cas9-2a-eGFP-p10-UTR-Opie2-dsRed
tatccacagaatcaggggataacgcaggaaagaacatgtgagcaaaaggccagcaaaaggccaggaaccgtaaaaaggccgcgttgctggcgtttttccataggctccgcccccctgacgagcatcacaaaaatcgacgctcaagtcagaggtggcgaaacccgacaggactataaagataccaggcgtttccccctggaagctccctcgtgcgctctcctgttccgaccctgccgcttaccggatacctgtccgcctttctcccttcgggaagcgtggcgctttctcaatgctcacgctgtaggtatctcagttcggtgtaggtcgttcgctccaagctgggctgtgtgcacgaaccccccgttcagcccgaccgctgcgccttatccggtaactatcgtcttgagtccaacccggtaagacacgacttatcgccactggcagcagccactggtaacaggattagcagagcgaggtatgtaggcggtgctacagagttcttgaagtggtggcctaactacggctacactagaaggacagtatttggtatctgcgctctgctgaagccagttaccttcggaaaaagagttggtagctcttgatccggcaaacaaaccaccgctggtagcggtggtttttttgtttgcaagcagcagattacgcgcagaaaaaaaggatctcaagaagatcctttgatcttttctacggggtctgacgctcagtggaacgaaaactcacgttaagggattttggtcatgagattatcaaaaaggatcttcacctagatccttttaaattaaaaatgaagttttaaatcaatctaaagtatatatgagtaaacttggtctgacagttaccaatgcttaatcagtgaggcacctatctcagcgatctgtctatttcgttcatccatagttgcctgactccccgtcgtgtagataactacgatacgggagggcttaccatctggccccagtgctgcaatgataccgcgagacccacgctcaccggctccagatttatcagcaataaaccagccagccggaagggccgagcgcagaagtggtcctgcaactttatccgcctccatccagtctattaattgttgccgggaagctagagtaagtagttcgccagttaatagtttgcgcaacgttgttgccattgctacaggcatcgtggtgtcacgctcgtcgtttggtatggcttcattcagctccggttcccaacgatcaaggcgagttacatgatcccccatgttgtgcaaaaaagcggttagctccttcggtcctccgatcgttgtcagaagtaagttggccgcagtgttatcactcatggttatggcagcactgcataattctcttactgtcatgccatccgtaagatgcttttctgtgactggtgagtactcaaccaagtcattctgagaatagtgtatgcggcgaccgagttgctcttgcccggcgtcaatacgggataataccgcgccacatagcagaactttaaaagtgctcatcattggaaaacgttcttcggggcgaaaactctcaaggatcttaccgctgttgagatccagttcgatgtaacccactcgtgcacccaactgatcttcagcatcttttactttcaccagcgtttctgggtgagcaaaaacaggaaggcaaaatgccgcaaaaaagggaataagggcgacacggaaatgttgaatactcatactcttcctttttcaatattattgaagcatttatcagggttattgtctcatgagcggatacatatttgaatgtatttagaaaaataaacaaataggggttccgcgcacatttccccgaaaagtgccacctgacgtctaagaaaccattattatcatgacattaacctataaaaataggcgtatcacgaggccctttcgtctcgcgcgtttcggtgatgacggtgaaaacctctgacacatgcagctcccggagacggtcacagcttgtctgtaagcggatgccgggagcagacaagcccgtcagggcgcgtcagcgggtgttggcgggtgtcggggctggcttaactatgcggcatcagagcagattgtactgagagtgcaccatatgcggtgtgaaataccgcacagatgcgtaaggagaaaataccgcatcaggcgccattcgccattcaggctgcgcaactgttgggaagggcgatcggtgcgggcctcttcgctattacgccagctggcgaaagggggatgtgctgcaaggcgattaagttgggtaacgccagggttttcccagtcacgacgttgtaaaacgacggccagtgccaagctttgtttaaaatataacaaaattgtgatcccacaaaatgaagtggggcaaaatcaaataattaactagtgtccgtaaacttgttggtcttcaactttttgaggaacacgttggacggcaaatcgtgactataacacaagttgatttaataattttagccaacacgtcgggctgcgtgttttttgcgctctgtgtacacgttgattaactggtcgattaaataatttaatttttggttcttctttaaatctgtgatgaaattttttaaaataactttaaattcttcattggtaaaaaatgccacgttttgcaacttgtgagggtctaatatgaggtcaaactcagtaggagttttatccaaaaaagaaaacatgattacgtctgtacacgaacgcgtattaacgcagagtgcaaagtataagagggttaaaaaatatattttacgcaccatatacgcatcgggttgatatcgttaatatggatcaatttgaacagttgattaacgtgtctctgctcaagtctttgatcaaaacgcaaatcgacgaaaatgtgtcggacaatatcaagtcgatgagcgaaaaactaaaaaggctagaatacgacaatctcacagacagcgttgagatatacggtattcacgacagcaggctgaataataaaaaaattagaaactattatttaaccctagaaagataatcatattgtgacgtacgttaaagataatcatgcgtaaaattgacgcatgtgttttatcggtctgtatatcgaggtttatttattaatttgaatagatattaagttttattatatttacacttacatactaataataaattcaacaaacaatttatttatgtttatttatttattaaaaaaaaacaaaaactcaaaatttcttctataaagtaacaaaacttttaaacattctctcttttacaaaaataaacttattttgtactttaaaaacagtcatgttgtattataaaataagtaattagcttaacttatacataatagaaacaaattatacttattagtcagtcagaaacaactttggcacatatcaatattatgctctcgacaaataacttttttgcattttttgcacgatgcatttgcctttcgccttattttagaggggcagtaagtacagtaagtacgttttttcattactggctcttcagtactgtcatctgatgtaccaggcacttcatttggcaaaatattagagatattatcgcgcaaatatctcttcaaagtaggagcttctaaacgcttacgcataaacgatgacgtcaggctcatgtaaaggtttctcataaattttttgcgactttgaaccttttctcccttgctactgacattatggctgtatataataaaagaatttatgcaggcaatgtttatcattccgtacaataatgccataggccacctattcgtcttcctactgcaggtcatcacagaacacatttggtctagcgtgtccactccgcctttagtttgattataatacataaccatttgcggtttaccggtactttcgttgatagaagcatcctcatcacaagatgataataagtataccatcttagctggcttcggtttatatgagacgagagtaaggggtccgtcaaaacaaaacatcgatgttcccactggcctggagcgactgtttttcagtacttccggtatctcgcgtttgtttgatcgcacggttcccacaatggttaattcgagctcgcccggggtcctaggtcgacgatgtaggtcacggtctcgaagccgcggtgcgggtgccagggcgtgcccttgggctccccgggcgcgtactccacctcacccatctggtccatcatgatgaacgggtcgaggtggcggtagttgatcccggcgaacgcgcggcgcaccgggaagccctcgccctcgaaaccgctgggcgcggtggtcacggtgagcacgggacgtgcgacggcgtcggcgggtgcggatacgcggggcagcgtcagcgggttctcgacggtcacggcgggcatgtcgacgcggccgccgtcgtcagttatggcgatgatgatggttgatgactgtgcgcatttcaagcgtagctttttatacaggcgaaaacttaaatggagaaaaaatattaaaatatttctgatcacaaaaatgcctttttatgtgaaatataggtgaaaaagaggtagctgatacaataactaggtgttaagttgcagtaacaaacatttttggatctcttttttgtcattttcttcatgtcctcgtttggtaagatgaggcgttgttaaaaatcacgctggatttaatcccaggcctcctgtcaattgacgccgtttcggcgatcagctgttccgaaacgtctcgtaaaatggcttatacaataatttataaaacgacaaccctaaattaaggcgaagtaggccgtcattgaaatttgtacgcgtcgttgatgattgttgctaagggttcattcatttatttcataacgctgaaattggccattcgctcccaatacgacaattcgtccggtggggtgtgctgctgtcgtcatgatgatggttgacgagagcaatgtcaaactcattcatggtttcaaaacattcggaacaaaatatttattttcaccgcttacttcacttatgtatgaaattgaatgagatccaatggtagagaattcatttatctacccaatggtatttttaggggcagcggagaatgttccgaagcgtgttttattcaagcgcaaaaatcgctcaggcgaaagttccaatgaatctaacctcacatatcctggttttccaacctcaaactagtgctcctaccagccggatctcaatttttataaaagtagtgcaataatacaaaaaaacaaacgtatgtagaacatagagaatggacattcctaccttttccgcctaactgtttcactgtgaaccgtcttatatcaggaaaataaaacatttttccccacagcggcatgtgatggatgcgtgaaaaatcaaatctctcatcatctgactagttgcgctaccaaagtatagatggctaacagtatgttgcgttttgcgattggaagcgtattttgggcacccacccacccccttgtaacgctttttgtatgaatgttattcaatttttgtatgggccgtaacatcgctacccaccccctctagcgttatgaaatttgtgaatgggccctaactcatctcacgatttcgaatcaaagaaaatcagttggttttgcactgacacagctgaaaaagtatcagcatacagcatactttatgcatcttagtgcgtaaagagatactttttcaagtcaatataaactatcaagactgagttttatcactttgaaatgcaagctgaaaggtcatcattgttgccaaaacgaatgacgggctacttagccttaagtaaatatagatattttgatgcttgaggcgaaaaaaaggtccgcagtgttatttttgaaaaatttaaggtggaaaacattggatgacacttttccgtgcattgaaatcaatacataaaaataaattacctggcatccctgtctggtagtggtgagtgcatgattaaaaaaatattaacggtcgacatttttcgcatttcttgcaatatattccattggcatctcaaatattccaataataccgcatcgagtataaattttcacttccatcaatggtcacatttaatctaatattcgaatttctccgccggatattccacaaaacccggcactgcccgcacgtaatcaactgtaactcattctagtaccgcaccgacactaacggaattttgctcccgtttcgtccgaattttttttttgctgtagaccagatcgaccttgccaaccttcacttcaagttcatcaagccaaggacgagcatcgccgcgttggaagaaaaataaggaaagtttcagaaaagtgttctgtggaatatcctcaaaagtgaaaatctaaaacacaaacgggtcgctaaaagcgtgcgtgaaaacagtgattaaaacctgtgtgaaaattgcgaatttcttcgaaagagtattggtaagtgtcgttcttttttccaccatgtgaccattttgtggaattttccttttcggaggaaaagcaggttgctgggataaaagaggttatcttttgtctacagagtgaaactcgagatggactataaggaccacgacggagactacaaggatcatgatattgattacaaagacgatgacgataagatggccccaaagaagaagcggaaggtcggtatccacggagtcccagcagccgacaagaagtacagcatcggcctggacatcggcaccaactctgtgggctgggccgtgatcaccgacgagtacaaggtgcccagcaagaaattcaaggtgctgggcaacaccgaccggcacagcatcaagaagaacctgatcggagccctgctgttcgacagcggcgaaacagccgaggccacccggctgaagagaaccgccagaagaagatacaccagacggaagaaccggatctgctatctgcaagagatcttcagcaacgagatggccaaggtggacgacagcttcttccacagactggaagagtccttcctggtggaagaggataagaagcacgagcggcaccccatcttcggcaacatcgtggacgaggtggcctaccacgagaagtaccccaccatctaccacctgagaaagaaactggtggacagcaccgacaaggccgacctgcggctgatctatctggccctggcccacatgatcaagttccggggccacttcctgatcgagggcgacctgaaccccgacaacagcgacgtggacaagctgttcatccagctggtgcagacctacaaccagctgttcgaggaaaaccccatcaacgccagcggcgtggacgccaaggccatcctgtctgccagactgagcaagagcagacggctggaaaatctgatcgcccagctgcccggcgagaagaagaatggcctgttcggaaacctgattgccctgagcctgggcctgacccccaacttcaagagcaacttcgacctggccgaggatgccaaactgcagctgagcaaggacacctacgacgacgacctggacaacctgctggcccagatcggcgaccagtacgccgacctgtttctggccgccaagaacctgtccgacgccatcctgctgagcgacatcctgagagtgaacaccgagatcaccaaggcccccctgagcgcctctatgatcaagagatacgacgagcaccaccaggacctgaccctgctgaaagctctcgtgcggcagcagctgcctgagaagtacaaagagattttcttcgaccagagcaagaacggctacgccggctacattgacggcggagccagccaggaagagttctacaagttcatcaagcccatcctggaaaagatggacggcaccgaggaactgctcgtgaagctgaacagagaggacctgctgcggaagcagcggaccttcgacaacggcagcatcccccaccagatccacctgggagagctgcacgccattctgcggcggcaggaagatttttacccattcctgaaggacaaccgggaaaagatcgagaagatcctgaccttccgcatcccctactacgtgggccctctggccaggggaaacagcagattcgcctggatgaccagaaagagcgaggaaaccatcaccccctggaacttcgaggaagtggtggacaagggcgcttccgcccagagcttcatcgagcggatgaccaacttcgataagaacctgcccaacgagaaggtgctgcccaagcacagcctgctgtacgagtacttcaccgtgtataacgagctgaccaaagtgaaatacgtgaccgagggaatgagaaagcccgccttcctgagcggcgagcagaaaaaggccatcgtggacctgctgttcaagaccaaccggaaagtgaccgtgaagcagctgaaagaggactacttcaagaaaatcgagtgcttcgactccgtggaaatctccggcgtggaagatcggttcaacgcctccctgggcacataccacgatctgctgaaaattatcaaggacaaggacttcctggacaatgaggaaaacgaggacattctggaagatatcgtgctgaccctgacactgtttgaggacagagagatgatcgaggaacggctgaaaacctatgcccacctgttcgacgacaaagtgatgaagcagctgaagcggcggagatacaccggctggggcaggctgagccggaagctgatcaacggcatccgggacaagcagtccggcaagacaatcctggatttcctgaagtccgacggcttcgccaacagaaacttcatgcagctgatccacgacgacagcctgacctttaaagaggacatccagaaagcccaggtgtccggccagggcgatagcctgcacgagcacattgccaatctggccggcagccccgccattaagaagggcatcctgcagacagtgaaggtggtggacgagctcgtgaaagtgatgggccggcacaagcccgagaacatcgtgatcgaaatggccagagagaaccagaccacccagaagggacagaagaacagccgcgagagaatgaagcggatcgaagagggcatcaaagagctgggcagccagatcctgaaagaacaccccgtggaaaacacccagctgcagaacgagaagctgtacctgtactacctgcagaatgggcgggatatgtacgtggaccaggaactggacatcaaccggctgtccgactacgatgtggaccatatcgtgcctcagagctttctgaaggacgactccatcgacaacaaggtgctgaccagaagcgacaagaaccggggcaagagcgacaacgtgccctccgaagaggtcgtgaagaagatgaagaactactggcggcagctgctgaacgccaagctgattacccagagaaagttcgacaatctgaccaaggccgagagaggcggcctgagcgaactggataaggccggcttcatcaagagacagctggtggaaacccggcagatcacaaagcacgtggcacagatcctggactcccggatgaacactaagtacgacgagaatgacaagctgatccgggaagtgaaagtgatcaccctgaagtccaagctggtgtccgatttccggaaggatttccagttttacaaagtgcgcgagatcaacaactaccaccacgcccacgacgcctacctgaacgccgtcgtgggaaccgccctgatcaaaaagtaccctaagctggaaagcgagttcgtgtacggcgactacaaggtgtacgacgtgcggaagatgatcgccaagagcgagcaggaaatcggcaaggctaccgccaagtacttcttctacagcaacatcatgaactttttcaagaccgagattaccctggccaacggcgagatccggaagcggcctctgatcgagacaaacggcgaaaccggggagatcgtgtgggataagggccgggattttgccaccgtgcggaaagtgctgagcatgccccaagtgaatatcgtgaaaaagaccgaggtgcagacaggcggcttcagcaaagagtctatcctgcccaagaggaacagcgataagctgatcgccagaaagaaggactgggaccctaagaagtacggcggcttcgacagccccaccgtggcctattctgtgctggtggtggccaaagtggaaaagggcaagtccaagaaactgaagagtgtgaaagagctgctggggatcaccatcatggaaagaagcagcttcgagaagaatcccatcgactttctggaagccaagggctacaaagaagtgaaaaaggacctgatcatcaagctgcctaagtactccctgttcgagctggaaaacggccggaagagaatgctggcctctgccggcgaactgcagaagggaaacgaactggccctgccctccaaatatgtgaacttcctgtacctggccagccactatgagaagctgaagggctcccccgaggataatgagcagaaacagctgtttgtggaacagcacaagcactacctggacgagatcatcgagcagatcagcgagttctccaagagagtgatcctggccgacgctaatctggacaaagtgctgtccgcctacaacaagcaccgggataagcccatcagagagcaggccgagaatatcatccacctgtttaccctgaccaatctgggagcccctgccgccttcaagtactttgacaccaccatcgaccggaagaggtacaccagcaccaaagaggtgctggacgccaccctgatccaccagagcatcaccggcctgtacgagacacggatcgacctgtctcagctgggaggcgacaaaaggccggcggccacgaaaaaggccggccaggcaaaaaagaaaaaggagggcagaggaagtcttctaacatgcggtgacgtggaggagaatcccggccctatggtgagcaagggcgaggagctgttcaccggggtggtgcccatcctggtcgagctggacggcgacgtaaacggccacaagttcagcgtgtccggcgagggcgagggcgatgccacctacggcaagctgaccctgaagttcatctgcaccaccagcaagctgcccgtgccctggcccaccctcgtgaccaccctgacctacggcgtgcagtgcttcagccgctaccccgaccacatgaagcagcacgacttcttcaagtccgccatgcccgaaggctacgtccaggagcgcaccatcttcttcaaggacgacggcaactacaagacccgcgccgaggtgaagttcgagggcgacaccctggtgaaccgcatcgagctgaagggcatcgacttcaaggaggacggcaacatcctggggcacaagctggagtacaactacaacagccacaacgtctatatcatggccgacaagcagaagaacggcatcaaggtgaacttcaagatccgccacaacatcgaggacggcagcgtgcagctcgccgaccactaccagcagaacacccccatcggcgacggccccgtgctgctgcccgacaaccactacctgagcacccagtccgccctgagcaaagaccccaacgagaagcgcgatcacatggtcctgctggagttcgtgaccgccgccgggatcactctcggcatggacgagctgtacaagtaattaattaactagaatgaatcgtttttaaaataacaaatcaattgttttataatattcgtacgattctttgattatgtaataaaatgtgatcattaggaagattacgaaaaatataaaaaatatgagttctgtgtgtataacaaatgctgtaaacgccacaattgtgtttgttgcaaataaacccatgattatttgattaaaattgttgttttctttgttcatagacaatagtgtgttttgcctaaacgtgtactgcataaactccatgcgagtgtatagcgagctagtggctaacgcttgccccaccaaagtagattcgtcaaaatcctcaatttcatcaccctcctccaagtttaacatttggccgtcggaattaacttctaaagatgccacataatctaataaatgaaatagagattcaaacgtggcgtcatcgtccgtttcgaccatttccgaaaagaactcgggcataaactctatgatttctctggacgtggtgttgtcgaaactctcaaagtacgcagtcaggaacgtgcgcgacatgtcgtcgggaaactcgcgcggaaacatgttgttgtaaccgaacgggtcccatagcgccaaaaccaaatctgccagcgtcaatagaatgagcacgatgccgacaatggagctggcttggatagcgattcgagttaacggccggggcgcgcccatactcggtggcctccccaccaccaacttttttgcactgcaaaaaaacacgcttttgcacgcgggcccatacatagtacaaactctacgtttcgtagactattttacataaatagtctacaccgttgtatacgctccaaatacactaccacacattgaacctttttgcagtgcaaaaaagtacgtgtcggcagtcacgtaggccggccttatcgggtcgcgtcctgtcacgtacgaatcacattatcggaccggacgagtgttgtcttatcgtgacaggacgccagcttcctgtgttgctaaccgcagccggacgcaactccttatcggaacaggacgcgcctccatatcagccgcgcgttatctcatgcgcgtgaccggacacgaggcgcccgtcccgcttatcgcgcctataaatacagcccgcaacgatctggtaaacacagttgaacagcatctgttacagcgacacaacatgagccggtccaacaacgccaacgcgcccacgccatccaaccgccgccgcaacctgtctctggtgatggtgcgctcctccaagaacgtcatcaaggagttcatgcgcttcaaggtgcgcatggagggcaccgtgaacggccacgagttcgagatcgagggcgagggcgagggccgcccctacgagggccacaacaccgtgaagctgaaggtgaccaagggcggccccctgcccttcgcctgggacatcctgtccccccagttccagtacggctccaaggtgtacgtgaagcaccccgccgacatccccgactacaagaagctgtccttccccgagggcttcaagtgggagcgcgtgatgaacttcgaggacggcggcgtggtgaccgtgacccaggactcctccctgcaggacggctgcttcatctacaaggtgaagttcatcggcgtgaacttcccctccgacggccccgtaatgcagaagaagaccatgggctgggaggcctccaccgagcgcctgtacccccgcgacggcgtgctgaagggcgagatccacaaggccctgaagctgaaggacggcggccactacctggtggagttcaagtccatctacatggccaagaagcccgtgcagctgcccggctactactacgtggactccaagctggacatcacctcccacaacgaggactacaccatcgtggagcagtacgagcgcaccgagggccgccaccacctgttcctgtaggactctagatcataatcagccataccacatttgtagaggttttacttgctttaaaaaacctcccacacctccccctgaacctgaaacataaaatgaatgcaattgttgttgttaacttgtttattgcagcttataatggttacaaataaagcaatagcatcacaaatttcacaaataaagcatttttttcactgcattctagttgtggtttgtccaaactcatcaatgtatcttaaagcttctaggccggccgatctcggatctgacaatgttcagtgcagagactcggctacgcctcgtggactttgaagttgaccaacaatgtttattcttacctctaatagtcctctgtggcaaggtcaagattctgttagaagccaatgaagaacctggttgttcaataacattttgttcgtctaatatttcactaccgcttgacgttggctgcacttcatgtacctcatctataaacgcttcttctgtatcgctctggacgtcatcttcacttacgtgatctgatatttcactgtcagaatcctcaccaacaagctcgtcatcgctttgcagaagagcagagaggatatgctcatcgtctaaagaactacccattttattatatattagtcacgatatctataacaagaaaatatatatataataagttatcacgtaagtagaacatgaaataacaatataattatcgtatgagttaaatcttaaaagtcacgtaaaagataatcatgcgtcattttgactcacgcggtcgttatagttcaaaatcagtgacacttaccgcattgacaagcacgcctcacgggagctccaagcggcgactgagatgtcctaaatgcacagcgacggattcgcgctatttagaaagagagagcaatatttcaagaatgcatgcgtcaattttacgcagactatctttctagggttaaaaaagatttgcgctttactcgacctaaactttaaacacgtcatagaatcttcgtttgacaaaaaccacattgtggccaagctgtgtgacgcgacgcgcgctaaagaatggcaaaccaagtcgcgcgagcgtcgactctagaggatccccgggtaccgagctcgaattcgtaatcatggtcatagctgtttcctgtgtgaaattgttatccgctcacaattccacacaacatacgagccggaagcataaagtgtaaagcctggggtgcctaatgagtgagctaactcacattaattgcgttgcgctcactgcccgctttccagtcgggaaacctgtcgtgccagctgcattaatgaatcggccaacgcgcggggagaggcggtttgcgtattgggcgctcttccgcttcctcgctcactgactcgctgcgctcggtcgttcggctgcggcgagcggtatcagctcactcaaaggcggtaatacggt

SEQ ID NO: 23 - DNA, 15257 bp, Artificial Sequence
  pBac-AAEL007097-Cas9-2a-eGFP-p10-UTR-Opie2-dsRed
tatccacagaatcaggggataacgcaggaaagaacatgtgagcaaaaggccagcaaaaggccaggaaccgtaaaaaggccgcgttgctggcgtttttccataggctccgcccccctgacgagcatcacaaaaatcgacgctcaagtcagaggtggcgaaacccgacaggactataaagataccaggcgtttccccctggaagctccctcgtgcgctctcctgttccgaccctgccgcttaccggatacctgtccgcctttctcccttcgggaagcgtggcgctttctcaatgctcacgctgtaggtatctcagttcggtgtaggtcgttcgctccaagctgggctgtgtgcacgaaccccccgttcagcccgaccgctgcgccttatccggtaactatcgtcttgagtccaacccggtaagacacgacttatcgccactggcagcagccactggtaacaggattagcagagcgaggtatgtaggcggtgctacagagttcttgaagtggtggcctaactacggctacactagaaggacagtatttggtatctgcgctctgctgaagccagttaccttcggaaaaagagttggtagctcttgatccggcaaacaaaccaccgctggtagcggtggtttttttgtttgcaagcagcagattacgcgcagaaaaaaaggatctcaagaagatcctttgatcttttctacggggtctgacgctcagtggaacgaaaactcacgttaagggattttggtcatgagattatcaaaaaggatcttcacctagatccttttaaattaaaaatgaagttttaaatcaatctaaagtatatatgagtaaacttggtctgacagttaccaatgcttaatcagtgaggcacctatctcagcgatctgtctatttcgttcatccatagttgcctgactccccgtcgtgtagataactacgatacgggagggcttaccatctggccccagtgctgcaatgataccgcgagacccacgctcaccggctccagatttatcagcaataaaccagccagccggaagggccgagcgcagaagtggtcctgcaactttatccgcctccatccagtctattaattgttgccgggaagctagagtaagtagttcgccagttaatagtttgcgcaacgttgttgccattgctacaggcatcgtggtgtcacgctcgtcgtttggtatggcttcattcagctccggttcccaacgatcaaggcgagttacatgatcccccatgttgtgcaaaaaagcggttagctccttcggtcctccgatcgttgtcagaagtaagttggccgcagtgttatcactcatggttatggcagcactgcataattctcttactgtcatgccatccgtaagatgcttttctgtgactggtgagtactcaaccaagtcattctgagaatagtgtatgcggcgaccgagttgctcttgcccggcgtcaatacgggataataccgcgccacatagcagaactttaaaagtgctcatcattggaaaacgttcttcggggcgaaaactctcaaggatcttaccgctgttgagatccagttcgatgtaacccactcgtgcacccaactgatcttcagcatcttttactttcaccagcgtttctgggtgagcaaaaacaggaaggcaaaatgccgcaaaaaagggaataagggcgacacggaaatgttgaatactcatactcttcctttttcaatattattgaagcatttatcagggttattgtctcatgagcggatacatatttgaatgtatttagaaaaataaacaaataggggttccgcgcacatttccccgaaaagtgccacctgacgtctaagaaaccattattatcatgacattaacctataaaaataggcgtatcacgaggccctttcgtctcgcgcgtttcggtgatgacggtgaaaacctctgacacatgcagctcccggagacggtcacagcttgtctgtaagcggatgccgggagcagacaagcccgtcagggcgcgtcagcgggtgttggcgggtgtcggggctggcttaactatgcggcatcagagcagattgtactgagagtgcaccatatgcggtgtgaaataccgcacagatgcgtaaggagaaaataccgcatcaggcgccattcgccattcaggctgcgcaactgttgggaagggcgatcggtgcgggcctcttcgctattacgccagctggcgaaagggggatgtgctgcaaggcgattaagttgggtaacgccagggttttcccagtcacgacgttgtaaaacgacggccagtgccaagctttgtttaaaatataacaaaattgtgatcccacaaaatgaagtggggcaaaatcaaataattaactagtgtccgtaaacttgttggtcttcaactttttgaggaacacgttggacggcaaatcgtgactataacacaagttgatttaataattttagccaacacgtcgggctgcgtgttttttgcgctctgtgtacacgttgattaactggtcgattaaataatttaatttttggttcttctttaaatctgtgatgaaattttttaaaataactttaaattcttcattggtaaaaaatgccacgttttgcaacttgtgagggtctaatatgaggtcaaactcagtaggagttttatccaaaaaagaaaacatgattacgtctgtacacgaacgcgtattaacgcagagtgcaaagtataagagggttaaaaaatatattttacgcaccatatacgcatcgggttgatatcgttaatatggatcaatttgaacagttgattaacgtgtctctgctcaagtctttgatcaaaacgcaaatcgacgaaaatgtgtcggacaatatcaagtcgatgagcgaaaaactaaaaaggctagaatacgacaatctcacagacagcgttgagatatacggtattcacgacagcaggctgaataataaaaaaattagaaactattatttaaccctagaaagataatcatattgtgacgtacgttaaagataatcatgcgtaaaattgacgcatgtgttttatcggtctgtatatcgaggtttatttattaatttgaatagatattaagttttattatatttacacttacatactaataataaattcaacaaacaatttatttatgtttatttatttattaaaaaaaaacaaaaactcaaaatttcttctataaagtaacaaaacttttaaacattctctcttttacaaaaataaacttattttgtactttaaaaacagtcatgttgtattataaaataagtaattagcttaacttatacataatagaaacaaattatacttattagtcagtcagaaacaactttggcacatatcaatattatgctctcgacaaataacttttttgcattttttgcacgatgcatttgcctttcgccttattttagaggggcagtaagtacagtaagtacgttttttcattactggctcttcagtactgtcatctgatgtaccaggcacttcatttggcaaaatattagagatattatcgcgcaaatatctcttcaaagtaggagcttctaaacgcttacgcataaacgatgacgtcaggctcatgtaaaggtttctcataaattttttgcgactttgaaccttttctcccttgctactgacattatggctgtatataataaaagaatttatgcaggcaatgtttatcattccgtacaataatgccataggccacctattcgtcttcctactgcaggtcatcacagaacacatttggtctagcgtgtccactccgcctttagtttgattataatacataaccatttgcggtttaccggtactttcgttgatagaagcatcctcatcacaagatgataataagtataccatcttagctggcttcggtttatatgagacgagagtaaggggtccgtcaaaacaaaacatcgatgttcccactggcctggagcgactgtttttcagtacttccggtatctcgcgtttgtttgatcgcacggttcccacaatggttaattcgagctcgcccggggtcctaggtcgacgatgtaggtcacggtctcgaagccgcggtgcgggtgccagggcgtgcccttgggctccccgggcgcgtactccacctcacccatctggtccatcatgatgaacgggtcgaggtggcggtagttgatcccggcgaacgcgcggcgcaccgggaagccctcgccctcgaaaccgctgggcgcggtggtcacggtgagcacgggacgtgcgacggcgtcggcgggtgcggatacgcggggcagcgtcagcgggttctcgacggtcacggcgggcatgtcgacgcggccgcacgttttgtgcgctccgggaaaagtcacgttgttgataaatgaatatcctggatccacgcacatacaaaacatcttccttgataagagctattaaccctctttttcccacgactttgattgacaatttcttgaagtgcttgagcaaataatgttgcaaatggtctacaccaggcctgcccaacctttttgaaccgcgggccaaatcgcagaaataattttgtgtcgcgggccacatttttaaacgcacaaatatttccataaagtctggcaaaagcctgtaaatgaagttcaaaaaacctgacaaaaatcagtgaatggagtcaatttcatttgaagaaatcgaaaaaagaaaagcttaacagcaattaagcattctgctggacattgtgaaaatcccttacaaaattatatgataatatagtccaaaatatttagaatagaatctatcctagaatgatactagaatttttttcaaacgtactccgaattttgtcagtatccgacttaaaattcttagcatgaaccggaatgataaactctgatcacgcttttacgaaaatcctggtaggaagtggtaaagaaaatcacatttctttaatcgcagtactcagttgagataaaatgtcatgtcaaatggggctctctgaattattttttttttacccatccactcaaggaattgctttatttttctcgagcgaaacagcaaactcagttttatccacgaaagtcgtgtccagaattcttaaaaaatcctgttcaagattttgtaaaatgcccgccttttctataatcctatcaaggataaatgtcgaatcaatgaatgaatgtacagtgatacctccatgagtcgatgttccatgactcgatatcgactcatggaaccatactaaaaacaaaatttcatggttactattactatacatactaaaaacaaaattacatggttagggaccatcatccctataagcaggtttgcaaaggattgctgttccatgactcgatatttccatgagtcgatggtcccttcaatatcgactcatggaggtttcactgtagatggaagtcatggtagaaatattgttgaaacactccgaattcgagattttgaatttgaatcatccatacaattcgatatctaagaaggttaaaaaacaaaacaatttaaataattactaagctagaatatgatattgaaactaaattgaaaatttaatagtcttggtatggtaactttgggttggtagaatattcagcgggcaaaatataagaagaatcttcgaaccctccgcgggccgcaaaaaatggagtcgcgggccggatgcggcccgcgggccgtacgttgggcagccctggtctacacttttcgaaatcggtttatttttttgtttgattgtttatcaatagttttactattgaaactcttagtttacttttggattaatctgctgagtatagaatcatattgtagtaactatgtattgcatagcattcatctggttctcaagtttgtcgaaaacgaatggagctctggaaccaccatggaaaagagagggttaaattgattgtcctcatttattcagtattgaagcatattggcatcaattcgctcacagacggttattcgctcacttctcaactacaattcaaatacaattatgatcgatgtatgcgatcgatcgatacgttgcctcttatagaatatcattatcatcatcgttttcaattgaacgataactcacaaacccgtaatcatcaactcagataatgatcaagaacccatttgggcagtttgtgcaagtgagctaaacagatgattcatggtactcagtaaataatggaaatgatttcgatatcaccatatagcgtgaatagcaatcctttctaatagttgccactagttttaacattcagttttaaagtcatgttcagtagcataacattttgtagcagaattgaaattttatgagcataatttacaattcataattgcaatcctgttagccaatttgagtgacttaaaactcaatggctgtgtatgatcaatcttgtgtagcaaatttagagtcattagattacaaacaatattgatacaaacttatgatttttttcatcaatatttttatcagaattttatcaggtattaaaatttcactcagttcagtgtccacatatttccgcatatgaacgatattgccacgaaaaccgatcgaaagaataagatagcttatcagtgagatactgttattcgaaacaatgctcttctcggtagaaacaatcacatctgtcgctttcctatccgcaacatgggctaaccatgcagatctcctttatctctctcgactataaatagggccttgaggtcactcaccgcttcaaaattgaactactatccagagaagaaagttaagttttatattcaagtgacaaagtgacagaaaactaagtgtattcaatagttgttttaaataagtgtgttaataagtgtccaaaatccaagtttaaacatggactataaggaccacgacggagactacaaggatcatgatattgattacaaagacgatgacgataagatggccccaaagaagaagcggaaggtcggtatccacggagtcccagcagccgacaagaagtacagcatcggcctggacatcggcaccaactctgtgggctgggccgtgatcaccgacgagtacaaggtgcccagcaagaaattcaaggtgctgggcaacaccgaccggcacagcatcaagaagaacctgatcggagccctgctgttcgacagcggcgaaacagccgaggccacccggctgaagagaaccgccagaagaagatacaccagacggaagaaccggatctgctatctgcaagagatcttcagcaacgagatggccaaggtggacgacagcttcttccacagactggaagagtccttcctggtggaagaggataagaagcacgagcggcaccccatcttcggcaacatcgtggacgaggtggcctaccacgagaagtaccccaccatctaccacctgagaaagaaactggtggacagcaccgacaaggccgacctgcggctgatctatctggccctggcccacatgatcaagttccggggccacttcctgatcgagggcgacctgaaccccgacaacagcgacgtggacaagctgttcatccagctggtgcagacctacaaccagctgttcgaggaaaaccccatcaacgccagcggcgtggacgccaaggccatcctgtctgccagactgagcaagagcagacggctggaaaatctgatcgcccagctgcccggcgagaagaagaatggcctgttcggaaacctgattgccctgagcctgggcctgacccccaacttcaagagcaacttcgacctggccgaggatgccaaactgcagctgagcaaggacacctacgacgacgacctggacaacctgctggcccagatcggcgaccagtacgccgacctgtttctggccgccaagaacctgtccgacgccatcctgctgagcgacatcctgagagtgaacaccgagatcaccaaggcccccctgagcgcctctatgatcaagagatacgacgagcaccaccaggacctgaccctgctgaaagctctcgtgcggcagcagctgcctgagaagtacaaagagattttcttcgaccagagcaagaacggctacgccggctacattgacggcggagccagccaggaagagttctacaagttcatcaagcccatcctggaaaagatggacggcaccgaggaactgctcgtgaagctgaacagagaggacctgctgcggaagcagcggaccttcgacaacggcagcatcccccaccagatccacctgggagagctgcacgccattctgcggcggcaggaagatttttacccattcctgaaggacaaccgggaaaagatcgagaagatcctgaccttccgcatcccctactacgtgggccctctggccaggggaaacagcagattcgcctggatgaccagaaagagcgaggaaaccatcaccccctggaacttcgaggaagtggtggacaagggcgcttccgcccagagcttcatcgagcggatgaccaacttcgataagaacctgcccaacgagaaggtgctgcccaagcacagcctgctgtacgagtacttcaccgtgtataacgagctgaccaaagtgaaatacgtgaccgagggaatgagaaagcccgccttcctgagcggcgagcagaaaaaggccatcgtggacctgctgttcaagaccaaccggaaagtgaccgtgaagcagctgaaagaggactacttcaagaaaatcgagtgcttcgactccgtggaaatctccggcgtggaagatcggttcaacgcctccctgggcacataccacgatctgctgaaaattatcaaggacaaggacttcctggacaatgaggaaaacgaggacattctggaagatatcgtgctgaccctgacactgtttgaggacagagagatgatcgaggaacggctgaaaacctatgcccacctgttcgacgacaaagtgatgaagcagctgaagcggcggagatacaccggctggggcaggctgagccggaagctgatcaacggcatccgggacaagcagtccggcaagacaatcctggatttcctgaagtccgacggcttcgccaacagaaacttcatgcagctgatccacgacgacagcctgacctttaaagaggacatccagaaagcccaggtgtccggccagggcgatagcctgcacgagcacattgccaatctggccggcagccccgccattaagaagggcatcctgcagacagtgaaggtggtggacgagctcgtgaaagtgatgggccggcacaagcccgagaacatcgtgatcgaaatggccagagagaaccagaccacccagaagggacagaagaacagccgcgagagaatgaagcggatcgaagagggcatcaaagagctgggcagccagatcctgaaagaacaccccgtggaaaacacccagctgcagaacgagaagctgtacctgtactacctgcagaatgggcgggatatgtacgtggaccaggaactggacatcaaccggctgtccgactacgatgtggaccatatcgtgcctcagagctttctgaaggacgactccatcgacaacaaggtgctgaccagaagcgacaagaaccggggcaagagcgacaacgtgccctccgaagaggtcgtgaagaagatgaagaactactggcggcagctgctgaacgccaagctgattacccagagaaagttcgacaatctgaccaaggccgagagaggcggcctgagcgaactggataaggccggcttcatcaagagacagctggtggaaacccggcagatcacaaagcacgtggcacagatcctggactcccggatgaacactaagtacgacgagaatgacaagctgatccgggaagtgaaagtgatcaccctgaagtccaagctggtgtccgatttccggaaggatttccagttttacaaagtgcgcgagatcaacaactaccaccacgcccacgacgcctacctgaacgccgtcgtgggaaccgccctgatcaaaaagtaccctaagctggaaagcgagttcgtgtacggcgactacaaggtgtacgacgtgcggaagatgatcgccaagagcgagcaggaaatcggcaaggctaccgccaagtacttcttctacagcaacatcatgaactttttcaagaccgagattaccctggccaacggcgagatccggaagcggcctctgatcgagacaaacggcgaaaccggggagatcgtgtgggataagggccgggattttgccaccgtgcggaaagtgctgagcatgccccaagtgaatatcgtgaaaaagaccgaggtgcagacaggcggcttcagcaaagagtctatcctgcccaagaggaacagcgataagctgatcgccagaaagaaggactgggaccctaagaagtacggcggcttcgacagccccaccgtggcctattctgtgctggtggtggccaaagtggaaaagggcaagtccaagaaactgaagagtgtgaaagagctgctggggatcaccatcatggaaagaagcagcttcgagaagaatcccatcgactttctggaagccaagggctacaaagaagtgaaaaaggacctgatcatcaagctgcctaagtactccctgttcgagctggaaaacggccggaagagaatgctggcctctgccggcgaactgcagaagggaaacgaactggccctgccctccaaatatgtgaacttcctgtacctggccagccactatgagaagctgaagggctcccccgaggataatgagcagaaacagctgtttgtggaacagcacaagcactacctggacgagatcatcgagcagatcagcgagttctccaagagagtgatcctggccgacgctaatctggacaaagtgctgtccgcctacaacaagcaccgggataagcccatcagagagcaggccgagaatatcatccacctgtttaccctgaccaatctgggagcccctgccgccttcaagtactttgacaccaccatcgaccggaagaggtacaccagcaccaaagaggtgctggacgccaccctgatccaccagagcatcaccggcctgtacgagacacggatcgacctgtctcagctgggaggcgacaaaaggccggcggccacgaaaaaggccggccaggcaaaaaagaaaaaggagggcagaggaagtcttctaacatgcggtgacgtggaggagaatcccggccctatggtgagcaagggcgaggagctgttcaccggggtggtgcccatcctggtcgagctggacggcgacgtaaacggccacaagttcagcgtgtccggcgagggcgagggcgatgccacctacggcaagctgaccctgaagttcatctgcaccaccagcaagctgcccgtgccctggcccaccctcgtgaccaccctgacctacggcgtgcagtgcttcagccgctaccccgaccacatgaagcagcacgacttcttcaagtccgccatgcccgaaggctacgtccaggagcgcaccatcttcttcaaggacgacggcaactacaagacccgcgccgaggtgaagttcgagggcgacaccctggtgaaccgcatcgagctgaagggcatcgacttcaaggaggacggcaacatcctggggcacaagctggagtacaactacaacagccacaacgtctatatcatggccgacaagcagaagaacggcatcaaggtgaacttcaagatccgccacaacatcgaggacggcagcgtgcagctcgccgaccactaccagcagaacacccccatcggcgacggccccgtgctgctgcccgacaaccactacctgagcacccagtccgccctgagcaaagaccccaacgagaagcgcgatcacatggtcctgctggagttcgtgaccgccgccgggatcactctcggcatggacgagctgtacaagtaattaattaactagaatgaatcgtttttaaaataacaaatcaattgttttataatattcgtacgattctttgattatgtaataaaatgtgatcattaggaagattacgaaaaatataaaaaatatgagttctgtgtgtataacaaatgctgtaaacgccacaattgtgtttgttgcaaataaacccatgattatttgattaaaattgttgttttctttgttcatagacaatagtgtgttttgcctaaacgtgtactgcataaactccatgcgagtgtatagcgagctagtggctaacgcttgccccaccaaagtagattcgtcaaaatcctcaatttcatcaccctcctccaagtttaacatttggccgtcggaattaacttctaaagatgccacataatctaataaatgaaatagagattcaaacgtggcgtcatcgtccgtttcgaccatttccgaaaagaactcgggcataaactctatgatttctctggacgtggtgttgtcgaaactctcaaagtacgcagtcaggaacgtgcgcgacatgtcgtcgggaaactcgcgcggaaacatgttgttgtaaccgaacgggtcccatagcgccaaaaccaaatctgccagcgtcaatagaatgagcacgatgccgacaatggagctggcttggatagcgattcgagttaacggccggggcgcgcccatactcggtggcctccccaccaccaacttttttgcactgcaaaaaaacacgcttttgcacgcgggcccatacatagtacaaactctacgtttcgtagactattttacataaatagtctacaccgttgtatacgctccaaatacactaccacacattgaacctttttgcagtgcaaaaaagtacgtgtcggcagtcacgtaggccggccttatcgggtcgcgtcctgtcacgtacgaatcacattatcggaccggacgagtgttgtcttatcgtgacaggacgccagcttcctgtgttgctaaccgcagccggacgcaactccttatcggaacaggacgcgcctccatatcagccgcgcgttatctcatgcgcgtgaccggacacgaggcgcccgtcccgcttatcgcgcctataaatacagcccgcaacgatctggtaaacacagttgaacagcatctgttacagcgacacaacatgagccggtccaacaacgccaacgcgcccacgccatccaaccgccgccgcaacctgtctctggtgatggtgcgctcctccaagaacgtcatcaaggagttcatgcgcttcaaggtgcgcatggagggcaccgtgaacggccacgagttcgagatcgagggcgagggcgagggccgcccctacgagggccacaacaccgtgaagctgaaggtgaccaagggcggccccctgcccttcgcctgggacatcctgtccccccagttccagtacggctccaaggtgtacgtgaagcaccccgccgacatccccgactacaagaagctgtccttccccgagggcttcaagtgggagcgcgtgatgaacttcgaggacggcggcgtggtgaccgtgacccaggactcctccctgcaggacggctgcttcatctacaaggtgaagttcatcggcgtgaacttcccctccgacggccccgtaatgcagaagaagaccatgggctgggaggcctccaccgagcgcctgtacccccgcgacggcgtgctgaagggcgagatccacaaggccctgaagctgaaggacggcggccactacctggtggagttcaagtccatctacatggccaagaagcccgtgcagctgcccggctactactacgtggactccaagctggacatcacctcccacaacgaggactacaccatcgtggagcagtacgagcgcaccgagggccgccaccacctgttcctgtaggactctagatcataatcagccataccacatttgtagaggttttacttgctttaaaaaacctcccacacctccccctgaacctgaaacataaaatgaatgcaattgttgttgttaacttgtttattgcagcttataatggttacaaataaagcaatagcatcacaaatttcacaaataaagcatttttttcactgcattctagttgtggtttgtccaaactcatcaatgtatcttaaagcttctaggccggccgatctcggatctgacaatgttcagtgcagagactcggctacgcctcgtggactttgaagttgaccaacaatgtttattcttacctctaatagtcctctgtggcaaggtcaagattctgttagaagccaatgaagaacctggttgttcaataacattttgttcgtctaatatttcactaccgcttgacgttggctgcacttcatgtacctcatctataaacgcttcttctgtatcgctctggacgtcatcttcacttacgtgatctgatatttcactgtcagaatcctcaccaacaagctcgtcatcgctttgcagaagagcagagaggatatgctcatcgtctaaagaactacccattttattatatattagtcacgatatctataacaagaaaatatatatataataagttatcacgtaagtagaacatgaaataacaatataattatcgtatgagttaaatcttaaaagtcacgtaaaagataatcatgcgtcattttgactcacgcggtcgttatagttcaaaatcagtgacacttaccgcattgacaagcacgcctcacgggagctccaagcggcgactgagatgtcctaaatgcacagcgacggattcgcgctatttagaaagagagagcaatatttcaagaatgcatgcgtcaattttacgcagactatctttctagggttaaaaaagatttgcgctttactcgacctaaactttaaacacgtcatagaatcttcgtttgacaaaaaccacattgtggccaagctgtgtgacgcgacgcgcgctaaagaatggcaaaccaagtcgcgcgagcgtcgactctagaggatccccgggtaccgagctcgaattcgtaatcatggtcatagctgtttcctgtgtgaaattgttatccgctcacaattccacacaacatacgagccggaagcataaagtgtaaagcctggggtgcctaatgagtgagctaactcacattaattgcgttgcgctcactgcccgctttccagtcgggaaacctgtcgtgccagctgcattaatgaatcggccaacgcgcggggagaggcggtttgcgtattgggcgctcttccgcttcctcgctcactgactcgctgcgctcggtcgttcggctgcggcgagcggtatcagctcactcaaaggcggtaatacggt

SEQ ID NO: 24 - DNA, 15794 bp, Artificial Sequence
  pBac-AAEL007584-Cas9-2a-eGFP-p10-UTR-Opie2-dsRed
tatccacagaatcaggggataacgcaggaaagaacatgtgagcaaaaggccagcaaaaggccaggaaccgtaaaaaggccgcgttgctggcgtttttccataggctccgcccccctgacgagcatcacaaaaatcgacgctcaagtcagaggtggcgaaacccgacaggactataaagataccaggcgtttccccctggaagctccctcgtgcgctctcctgttccgaccctgccgcttaccggatacctgtccgcctttctcccttcgggaagcgtggcgctttctcaatgctcacgctgtaggtatctcagttcggtgtaggtcgttcgctccaagctgggctgtgtgcacgaaccccccgttcagcccgaccgctgcgccttatccggtaactatcgtcttgagtccaacccggtaagacacgacttatcgccactggcagcagccactggtaacaggattagcagagcgaggtatgtaggcggtgctacagagttcttgaagtggtggcctaactacggctacactagaaggacagtatttggtatctgcgctctgctgaagccagttaccttcggaaaaagagttggtagctcttgatccggcaaacaaaccaccgctggtagcggtggtttttttgtttgcaagcagcagattacgcgcagaaaaaaaggatctcaagaagatcctttgatcttttctacggggtctgacgctcagtggaacgaaaactcacgttaagggattttggtcatgagattatcaaaaaggatcttcacctagatccttttaaattaaaaatgaagttttaaatcaatctaaagtatatatgagtaaacttggtctgacagttaccaatgcttaatcagtgaggcacctatctcagcgatctgtctatttcgttcatccatagttgcctgactccccgtcgtgtagataactacgatacgggagggcttaccatctggccccagtgctgcaatgataccgcgagacccacgctcaccggctccagatttatcagcaataaaccagccagccggaagggccgagcgcagaagtggtcctgcaactttatccgcctccatccagtctattaattgttgccgggaagctagagtaagtagttcgccagttaatagtttgcgcaacgttgttgccattgctacaggcatcgtggtgtcacgctcgtcgtttggtatggcttcattcagctccggttcccaacgatcaaggcgagttacatgatcccccatgttgtgcaaaaaagcggttagctccttcggtcctccgatcgttgtcagaagtaagttggccgcagtgttatcactcatggttatggcagcactgcataattctcttactgtcatgccatccgtaagatgcttttctgtgactggtgagtactcaaccaagtcattctgagaatagtgtatgcggcgaccgagttgctcttgcccggcgtcaatacgggataataccgcgccacatagcagaactttaaaagtgctcatcattggaaaacgttcttcggggcgaaaactctcaaggatcttaccgctgttgagatccagttcgatgtaacccactcgtgcacccaactgatcttcagcatcttttactttcaccagcgtttctgggtgagcaaaaacaggaaggcaaaatgccgcaaaaaagggaataagggcgacacggaaatgttgaatactcatactcttcctttttcaatattattgaagcatttatcagggttattgtctcatgagcggatacatatttgaatgtatttagaaaaataaacaaataggggttccgcgcacatttccccgaaaagtgccacctgacgtctaagaaaccattattatcatgacattaacctataaaaataggcgtatcacgaggccctttcgtctcgcgcgtttcggtgatgacggtgaaaacctctgacacatgcagctcccggagacggtcacagcttgtctgtaagcggatgccgggagcagacaagcccgtcagggcgcgtcagcgggtgttggcgggtgtcggggctggcttaactatgcggcatcagagcagattgtactgagagtgcaccatatgcggtgtgaaataccgcacagatgcgtaaggagaaaataccgcatcaggcgccattcgccattcaggctgcgcaactgttgggaagggcgatcggtgcgggcctcttcgctattacgccagctggcgaaagggggatgtgctgcaaggcgattaagttgggtaacgccagggttttcccagtcacgacgttgtaaaacgacggccagtgccaagctttgtttaaaatataacaaaattgtgatcccacaaaatgaagtggggcaaaatcaaataattaactagtgtccgtaaacttgttggtcttcaactttttgaggaacacgttggacggcaaatcgtgactataacacaagttgatttaataattttagccaacacgtcgggctgcgtgttttttgcgctctgtgtacacgttgattaactggtcgattaaataatttaatttttggttcttctttaaatctgtgatgaaattttttaaaataactttaaattcttcattggtaaaaaatgccacgttttgcaacttgtgagggtctaatatgaggtcaaactcagtaggagttttatccaaaaaagaaaacatgattacgtctgtacacgaacgcgtattaacgcagagtgcaaagtataagagggttaaaaaatatattttacgcaccatatacgcatcgggttgatatcgttaatatggatcaatttgaacagttgattaacgtgtctctgctcaagtctttgatcaaaacgcaaatcgacgaaaatgtgtcggacaatatcaagtcgatgagcgaaaaactaaaaaggctagaatacgacaatctcacagacagcgttgagatatacggtattcacgacagcaggctgaataataaaaaaattagaaactattatttaaccctagaaagataatcatattgtgacgtacgttaaagataatcatgcgtaaaattgacgcatgtgttttatcggtctgtatatcgaggtttatttattaatttgaatagatattaagttttattatatttacacttacatactaataataaattcaacaaacaatttatttatgtttatttatttattaaaaaaaaacaaaaactcaaaatttcttctataaagtaacaaaacttttaaacattctctcttttacaaaaataaacttattttgtactttaaaaacagtcatgttgtattataaaataagtaattagcttaacttatacataatagaaacaaattatacttattagtcagtcagaaacaactttggcacatatcaatattatgctctcgacaaataacttttttgcattttttgcacgatgcatttgcctttcgccttattttagaggggcagtaagtacagtaagtacgttttttcattactggctcttcagtactgtcatctgatgtaccaggcacttcatttggcaaaatattagagatattatcgcgcaaatatctcttcaaagtaggagcttctaaacgcttacgcataaacgatgacgtcaggctcatgtaaaggtttctcataaattttttgcgactttgaaccttttctcccttgctactgacattatggctgtatataataaaagaatttatgcaggcaatgtttatcattccgtacaataatgccataggccacctattcgtcttcctactgcaggtcatcacagaacacatttggtctagcgtgtccactccgcctttagtttgattataatacataaccatttgcggtttaccggtactttcgttgatagaagcatcctcatcacaagatgataataagtataccatcttagctggcttcggtttatatgagacgagagtaaggggtccgtcaaaacaaaacatcgatgttcccactggcctggagcgactgtttttcagtacttccggtatctcgcgtttgtttgatcgcacggttcccacaatggttaattcgagctcgcccggggtcctaggtcgacgatgtaggtcacggtctcgaagccgcggtgcgggtgccagggcgtgcccttgggctccccgggcgcgtactccacctcacccatctggtccatcatgatgaacgggtcgaggtggcggtagttgatcccggcgaacgcgcggcgcaccgggaagccctcgccctcgaaaccgctgggcgcggtggtcacggtgagcacgggacgtgcgacggcgtcggcgggtgcggatacgcggggcagcgtcagcgggttctcgacggtcacggcgggcatgtcgacgcggccgctcacccgaaatacggtacttatgatcagcgtaccagccataaaagtggaatttaaattttgtaatttgtgtgcaataaccagtttcgtgaatgttttgccgttattctgttaacaaaaagccgaaaaatctttaaaaatttcagatgttcctttatagattttttttaaaggatggtcggaatccctaaaaatactgtaaaactaataaatgtttaggaaacctcagggaacttttggtgaacctccgaaaaccccttgagaacctcttggagactttacaattacctcttgggaatcaaagtagacgacttagacaccgctgttgcaatttctatgatcgtcttgttttttctttcatctctacagaaatcttcatcgaaacaggcatctgcagaggtgtccacagatttttattacagaagtacatatactatattcaccaaagtgtcccacaaaattgccacagaagattctataaaactctccacaagaatgttctgctccaaatatttattcacgaaaataatcacaaaatctccacatatgtcttccaataagtatttacaaagtctctgtggaactctacacaatagctcccacaaaagcttccatagaagtcttcattaaggttcccaaagaagtttccacgaatgcatccatagaaacttaacagaagtcttcgaggatatctttaaaaaaataactcttaacagaggattccaaagaagttttcacataaagcaccacaaaagtctttacaaagtgtgccacagaagtcaccacaaacgtgtccatagaattttcacataattattcattgaagtatgtacacaagtttcactaatgtctcacgaatgtttccaaaaaataattcacaaaattatccgcaatacattccagaacattttccaacaaaattcaaagtgatatcaacaggaaatctcgtaataatcctccataaaggtttcacaaagacattgagtagtgtttggtccgttgaatctgttgcacgctcctttgtgggcgagcgacggaattcgaatcgtgtccggttcacttagtaaccgcactatcggtatcgatcatccgtatatatgttcacatattcattaaaaattataactttacctaaacgaatccttttccatatccaaactcccagtgttttcttgtggaagtgcagaggactcctcggcttccgtaaagcaagtaacacgtcaacatttccctcccattcccaaattgacctgcattcggacgcagccggcgttgtgataataatgagagcaccagtacttacacattgagaatgctattgatcctgagtagcatctgttggttccctgtgtaagtacagctgttcttgcaataacagagtagcaacttcgggcggtcaatcatgctcatgctcataaaggtttcacaaagacatcctcaaaagtttcactagaagtcttgacaaaatacagcaaaaacttaagtgaattgtgaaagagggattcaacttaaatattgttcgggaaaaatgtctcgtatatttgaaatggtagcgttaccaggagcataaaatgtttgtaaattcaaatgagcagtgtaagcaaatacgaaataaagacatagtagacgggctcagagtgggtgccatacttctagtaaaacttttggcccttgttactgctaaaggtatttacacaagtttgacagattgcaatacacttttcacggtatcctgtatttttctttgctatcttatgtgccataaaatttcgagcaactgaaaggaacatggtggactttgtttcatttttggtgaaatagaggagtatagaagtagagctgcatttcgtcaaatgatccatttgagattcttccaaaagtttctcccatggatgactaaatacatggaacaaattaaatatttaaacggcatttgcaaagaaaatggcagcactgaatatcccaccttgtagtgatttattccaaagaatacgcatttttttctcagacttccaacgcctttccttagagcaaaatcctaatcaaagcaaccattgacaagtgacaaattgccttgctagaactaccatcgaccgcgcgcgcctacttcgtccacccccacgtggacgtttccgatgcggtgaccgagacataagactcttaacgtggattatagagtccgtcccattgtcgaaccatctccaatgcgaagaaaattctttttcatctccttcaacgcacgcaaacggaatcaattgttgaaaagttaatacccctcacatggactacggacatcggtgcaagacaatttcccaccgcagatggatcccgctttctggatggcaggctctggtgtgtcattgttgggcctaattgagatgtcaccacatattgattgtgaacacgtaatcaactgtgaagttcgcacacattcgaaccacttagaaacggtagctgttggttgtcgttgaagacggccatccagttcagtggtgaaacagcctactaagtattcgtttgttgatccggggtttgtcagtagaattcgatcgttttggggtgatttttggtcggatttgtggatcaactgaatgaagtgaacctcgtataaaacagtaagctccgaaaagaatgtggaatatttttaaattatttggaagatgtttaagcactgtttcaaatgatttccaagcacagacacaagatttcaacagctattcactagtcgtttgtagtgttccgtattgttgttctttgaaaagaaatcaaccattatcttttatttttggacaaaatataaacaattcagaggtaccacatcacatggattccccttacaaattatgattctcctaatttcataccaaaacagcagaccgttgctatgtttcgttcatacctagtctttcaataaaaggagtgaatagctttggaattctccagtcgagtcaaaaacagaagtggaattgcaatgaaacagtgcttactaagttatctttctaccaaaatattcaaaaaatgttttttcgcattatcacagcctcgagatggactataaggaccacgacggagactacaaggatcatgatattgattacaaagacgatgacgataagatggccccaaagaagaagcggaaggtcggtatccacggagtcccagcagccgacaagaagtacagcatcggcctggacatcggcaccaactctgtgggctgggccgtgatcaccgacgagtacaaggtgcccagcaagaaattcaaggtgctgggcaacaccgaccggcacagcatcaagaagaacctgatcggagccctgctgttcgacagcggcgaaacagccgaggccacccggctgaagagaaccgccagaagaagatacaccagacggaagaaccggatctgctatctgcaagagatcttcagcaacgagatggccaaggtggacgacagcttcttccacagactggaagagtccttcctggtggaagaggataagaagcacgagcggcaccccatcttcggcaacatcgtggacgaggtggcctaccacgagaagtaccccaccatctaccacctgagaaagaaactggtggacagcaccgacaaggccgacctgcggctgatctatctggccctggcccacatgatcaagttccggggccacttcctgatcgagggcgacctgaaccccgacaacagcgacgtggacaagctgttcatccagctggtgcagacctacaaccagctgttcgaggaaaaccccatcaacgccagcggcgtggacgccaaggccatcctgtctgccagactgagcaagagcagacggctggaaaatctgatcgcccagctgcccggcgagaagaagaatggcctgttcggaaacctgattgccctgagcctgggcctgacccccaacttcaagagcaacttcgacctggccgaggatgccaaactgcagctgagcaaggacacctacgacgacgacctggacaacctgctggcccagatcggcgaccagtacgccgacctgtttctggccgccaagaacctgtccgacgccatcctgctgagcgacatcctgagagtgaacaccgagatcaccaaggcccccctgagcgcctctatgatcaagagatacgacgagcaccaccaggacctgaccctgctgaaagctctcgtgcggcagcagctgcctgagaagtacaaagagattttcttcgaccagagcaagaacggctacgccggctacattgacggcggagccagccaggaagagttctacaagttcatcaagcccatcctggaaaagatggacggcaccgaggaactgctcgtgaagctgaacagagaggacctgctgcggaagcagcggaccttcgacaacggcagcatcccccaccagatccacctgggagagctgcacgccattctgcggcggcaggaagatttttacccattcctgaaggacaaccgggaaaagatcgagaagatcctgaccttccgcatcccctactacgtgggccctctggccaggggaaacagcagattcgcctggatgaccagaaagagcgaggaaaccatcaccccctggaacttcgaggaagtggtggacaagggcgcttccgcccagagcttcatcgagcggatgaccaacttcgataagaacctgcccaacgagaaggtgctgcccaagcacagcctgctgtacgagtacttcaccgtgtataacgagctgaccaaagtgaaatacgtgaccgagggaatgagaaagcccgccttcctgagcggcgagcagaaaaaggccatcgtggacctgctgttcaagaccaaccggaaagtgaccgtgaagcagctgaaagaggactacttcaagaaaatcgagtgcttcgactccgtggaaatctccggcgtggaagatcggttcaacgcctccctgggcacataccacgatctgctgaaaattatcaaggacaaggacttcctggacaatgaggaaaacgaggacattctggaagatatcgtgctgaccctgacactgtttgaggacagagagatgatcgaggaacggctgaaaacctatgcccacctgttcgacgacaaagtgatgaagcagctgaagcggcggagatacaccggctggggcaggctgagccggaagctgatcaacggcatccgggacaagcagtccggcaagacaatcctggatttcctgaagtccgacggcttcgccaacagaaacttcatgcagctgatccacgacgacagcctgacctttaaagaggacatccagaaagcccaggtgtccggccagggcgatagcctgcacgagcacattgccaatctggccggcagccccgccattaagaagggcatcctgcagacagtgaaggtggtggacgagctcgtgaaagtgatgggccggcacaagcccgagaacatcgtgatcgaaatggccagagagaaccagaccacccagaagggacagaagaacagccgcgagagaatgaagcggatcgaagagggcatcaaagagctgggcagccagatcctgaaagaacaccccgtggaaaacacccagctgcagaacgagaagctgtacctgtactacctgcagaatgggcgggatatgtacgtggaccaggaactggacatcaaccggctgtccgactacgatgtggaccatatcgtgcctcagagctttctgaaggacgactccatcgacaacaaggtgctgaccagaagcgacaagaaccggggcaagagcgacaacgtgccctccgaagaggtcgtgaagaagatgaagaactactggcggcagctgctgaacgccaagctgattacccagagaaagttcgacaatctgaccaaggccgagagaggcggcctgagcgaactggataaggccggcttcatcaagagacagctggtggaaacccggcagatcacaaagcacgtggcacagatcctggactcccggatgaacactaagtacgacgagaatgacaagctgatccgggaagtgaaagtgatcaccctgaagtccaagctggtgtccgatttccggaaggatttccagttttacaaagtgcgcgagatcaacaactaccaccacgcccacgacgcctacctgaacgccgtcgtgggaaccgccctgatcaaaaagtaccctaagctggaaagcgagttcgtgtacggcgactacaaggtgtacgacgtgcggaagatgatcgccaagagcgagcaggaaatcggcaaggctaccgccaagtacttcttctacagcaacatcatgaactttttcaagaccgagattaccctggccaacggcgagatccggaagcggcctctgatcgagacaaacggcgaaaccggggagatcgtgtgggataagggccgggattttgccaccgtgcggaaagtgctgagcatgccccaagtgaatatcgtgaaaaagaccgaggtgcagacaggcggcttcagcaaagagtctatcctgcccaagaggaacagcgataagctgatcgccagaaagaaggactgggaccctaagaagtacggcggcttcgacagccccaccgtggcctattctgtgctggtggtggccaaagtggaaaagggcaagtccaagaaactgaagagtgtgaaagagctgctggggatcaccatcatggaaagaagcagcttcgagaagaatcccatcgactttctggaagccaagggctacaaagaagtgaaaaaggacctgatcatcaagctgcctaagtactccctgttcgagctggaaaacggccggaagagaatgctggcctctgccggcgaactgcagaagggaaacgaactggccctgccctccaaatatgtgaacttcctgtacctggccagccactatgagaagctgaagggctcccccgaggataatgagcagaaacagctgtttgtggaacagcacaagcactacctggacgagatcatcgagcagatcagcgagttctccaagagagtgatcctggccgacgctaatctggacaaagtgctgtccgcctacaacaagcaccgggataagcccatcagagagcaggccgagaatatcatccacctgtttaccctgaccaatctgggagcccctgccgccttcaagtactttgacaccaccatcgaccggaagaggtacaccagcaccaaagaggtgctggacgccaccctgatccaccagagcatcaccggcctgtacgagacacggatcgacctgtctcagctgggaggcgacaaaaggccggcggccacgaaaaaggccggccaggcaaaaaagaaaaaggagggcagaggaagtcttctaacatgcggtgacgtggaggagaatcccggccctatggtgagcaagggcgaggagctgttcaccggggtggtgcccatcctggtcgagctggacggcgacgtaaacggccacaagttcagcgtgtccggcgagggcgagggcgatgccacctacggcaagctgaccctgaagttcatctgcaccaccagcaagctgcccgtgccctggcccaccctcgtgaccaccctgacctacggcgtgcagtgcttcagccgctaccccgaccacatgaagcagcacgacttcttcaagtccgccatgcccgaaggctacgtccaggagcgcaccatcttcttcaaggacgacggcaactacaagacccgcgccgaggtgaagttcgagggcgacaccctggtgaaccgcatcgagctgaagggcatcgacttcaaggaggacggcaacatcctggggcacaagctggagtacaactacaacagccacaacgtctatatcatggccgacaagcagaagaacggcatcaaggtgaacttcaagatccgccacaacatcgaggacggcagcgtgcagctcgccgaccactaccagcagaacacccccatcggcgacggccccgtgctgctgcccgacaaccactacctgagcacccagtccgccctgagcaaagaccccaacgagaagcgcgatcacatggtcctgctggagttcgtgaccgccgccgggatcactctcggcatggacgagctgtacaagtaattaattaactagaatgaatcgtttttaaaataacaaatcaattgttttataatattcgtacgattctttgattatgtaataaaatgtgatcattaggaagattacgaaaaatataaaaaatatgagttctgtgtgtataacaaatgctgtaaacgccacaattgtgtttgttgcaaataaacccatgattatttgattaaaattgttgttttctttgttcatagacaatagtgtgttttgcctaaacgtgtactgcataaactccatgcgagtgtatagcgagctagtggctaacgcttgccccaccaaagtagattcgtcaaaatcctcaatttcatcaccctcctccaagtttaacatttggccgtcggaattaacttctaaagatgccacataatctaataaatgaaatagagattcaaacgtggcgtcatcgtccgtttcgaccatttccgaaaagaactcgggcataaactctatgatttctctggacgtggtgttgtcgaaactctcaaagtacgcagtcaggaacgtgcgcgacatgtcgtcgggaaactcgcgcggaaacatgttgttgtaaccgaacgggtcccatagcgccaaaaccaaatctgccagcgtcaatagaatgagcacgatgccgacaatggagctggcttggatagcgattcgagttaacggccggggcgcgcccatactcggtggcctccccaccaccaacttttttgcactgcaaaaaaacacgcttttgcacgcgggcccatacatagtacaaactctacgtttcgtagactattttacataaatagtctacaccgttgtatacgctccaaatacactaccacacattgaacctttttgcagtgcaaaaaagtacgtgtcggcagtcacgtaggccggccttatcgggtcgcgtcctgtcacgtacgaatcacattatcggaccggacgagtgttgtcttatcgtgacaggacgccagcttcctgtgttgctaaccgcagccggacgcaactccttatcggaacaggacgcgcctccatatcagccgcgcgttatctcatgcgcgtgaccggacacgaggcgcccgtcccgcttatcgcgcctataaatacagcccgcaacgatctggtaaacacagttgaacagcatctgttacagcgacacaacatgagccggtccaacaacgccaacgcgcccacgccatccaaccgccgccgcaacctgtctctggtgatggtgcgctcctccaagaacgtcatcaaggagttcatgcgcttcaaggtgcgcatggagggcaccgtgaacggccacgagttcgagatcgagggcgagggcgagggccgcccctacgagggccacaacaccgtgaagctgaaggtgaccaagggcggccccctgcccttcgcctgggacatcctgtccccccagttccagtacggctccaaggtgtacgtgaagcaccccgccgacatccccgactacaagaagctgtccttccccgagggcttcaagtgggagcgcgtgatgaacttcgaggacggcggcgtggtgaccgtgacccaggactcctccctgcaggacggctgcttcatctacaaggtgaagttcatcggcgtgaacttcccctccgacggccccgtaatgcagaagaagaccatgggctgggaggcctccaccgagcgcctgtacccccgcgacggcgtgctgaagggcgagatccacaaggccctgaagctgaaggacggcggccactacctggtggagttcaagtccatctacatggccaagaagcccgtgcagctgcccggctactactacgtggactccaagctggacatcacctcccacaacgaggactacaccatcgtggagcagtacgagcgcaccgagggccgccaccacctgttcctgtaggactctagatcataatcagccataccacatttgtagaggttttacttgctttaaaaaacctcccacacctccccctgaacctgaaacataaaatgaatgcaattgttgttgttaacttgtttattgcagcttataatggttacaaataaagcaatagcatcacaaatttcacaaataaagcatttttttcactgcattctagttgtggtttgtccaaactcatcaatgtatcttaaagcttctaggccggccgatctcggatctgacaatgttcagtgcagagactcggctacgcctcgtggactttgaagttgaccaacaatgtttattcttacctctaatagtcctctgtggcaaggtcaagattctgttagaagccaatgaagaacctggttgttcaataacattttgttcgtctaatatttcactaccgcttgacgttggctgcacttcatgtacctcatctataaacgcttcttctgtatcgctctggacgtcatcttcacttacgtgatctgatatttcactgtcagaatcctcaccaacaagctcgtcatcgctttgcagaagagcagagaggatatgctcatcgtctaaagaactacccattttattatatattagtcacgatatctataacaagaaaatatatatataataagttatcacgtaagtagaacatgaaataacaatataattatcgtatgagttaaatcttaaaagtcacgtaaaagataatcatgcgtcattttgactcacgcggtcgttatagttcaaaatcagtgacacttaccgcattgacaagcacgcctcacgggagctccaagcggcgactgagatgtcctaaatgcacagcgacggattcgcgctatttagaaagagagagcaatatttcaagaatgcatgcgtcaattttacgcagactatctttctagggttaaaaaagatttgcgctttactcgacctaaactttaaacacgtcatagaatcttcgtttgacaaaaaccacattgtggccaagctgtgtgacgcgacgcgcgctaaagaatggcaaaccaagtcgcgcgagcgtcgactctagaggatccccgggtaccgagctcgaattcgtaatcatggtcatagctgtttcctgtgtgaaattgttatccgctcacaattccacacaacatacgagccggaagcataaagtgtaaagcctggggtgcctaatgagtgagctaactcacattaattgcgttgcgctcactgcccgctttccagtcgggaaacctgtcgtgccagctgcattaatgaatcggccaacgcgcggggagaggcggtttgcgtattgggcgctcttccgcttcctcgctcactgactcgctgcgctcggtcgttcggctgcggcgagcggtatcagctcactcaaaggcggtaatacggt

SEQ ID NO: 25 - DNA, 15789 bp, Artificial Sequence
  pBac-AAEL005635-Cas9-2a-eGFP-p10-UTR-Opie2-dsRed
tatccacagaatcaggggataacgcaggaaagaacatgtgagcaaaaggccagcaaaaggccaggaaccgtaaaaaggccgcgttgctggcgtttttccataggctccgcccccctgacgagcatcacaaaaatcgacgctcaagtcagaggtggcgaaacccgacaggactataaagataccaggcgtttccccctggaagctccctcgtgcgctctcctgttccgaccctgccgcttaccggatacctgtccgcctttctcccttcgggaagcgtggcgctttctcaatgctcacgctgtaggtatctcagttcggtgtaggtcgttcgctccaagctgggctgtgtgcacgaaccccccgttcagcccgaccgctgcgccttatccggtaactatcgtcttgagtccaacccggtaagacacgacttatcgccactggcagcagccactggtaacaggattagcagagcgaggtatgtaggcggtgctacagagttcttgaagtggtggcctaactacggctacactagaaggacagtatttggtatctgcgctctgctgaagccagttaccttcggaaaaagagttggtagctcttgatccggcaaacaaaccaccgctggtagcggtggtttttttgtttgcaagcagcagattacgcgcagaaaaaaaggatctcaagaagatcctttgatcttttctacggggtctgacgctcagtggaacgaaaactcacgttaagggattttggtcatgagattatcaaaaaggatcttcacctagatccttttaaattaaaaatgaagttttaaatcaatctaaagtatatatgagtaaacttggtctgacagttaccaatgcttaatcagtgaggcacctatctcagcgatctgtctatttcgttcatccatagttgcctgactccccgtcgtgtagataactacgatacgggagggcttaccatctggccccagtgctgcaatgataccgcgagacccacgctcaccggctccagatttatcagcaataaaccagccagccggaagggccgagcgcagaagtggtcctgcaactttatccgcctccatccagtctattaattgttgccgggaagctagagtaagtagttcgccagttaatagtttgcgcaacgttgttgccattgctacaggcatcgtggtgtcacgctcgtcgtttggtatggcttcattcagctccggttcccaacgatcaaggcgagttacatgatcccccatgttgtgcaaaaaagcggttagctccttcggtcctccgatcgttgtcagaagtaagttggccgcagtgttatcactcatggttatggcagcactgcataattctcttactgtcatgccatccgtaagatgcttttctgtgactggtgagtactcaaccaagtcattctgagaatagtgtatgcggcgaccgagttgctcttgcccggcgtcaatacgggataataccgcgccacatagcagaactttaaaagtgctcatcattggaaaacgttcttcggggcgaaaactctcaaggatcttaccgctgttgagatccagttcgatgtaacccactcgtgcacccaactgatcttcagcatcttttactttcaccagcgtttctgggtgagcaaaaacaggaaggcaaaatgccgcaaaaaagggaataagggcgacacggaaatgttgaatactcatactcttcctttttcaatattattgaagcatttatcagggttattgtctcatgagcggatacatatttgaatgtatttagaaaaataaacaaataggggttccgcgcacatttccccgaaaagtgccacctgacgtctaagaaaccattattatcatgacattaacctataaaaataggcgtatcacgaggccctttcgtctcgcgcgtttcggtgatgacggtgaaaacctctgacacatgcagctcccggagacggtcacagcttgtctgtaagcggatgccgggagcagacaagcccgtcagggcgcgtcagcgggtgttggcgggtgtcggggctggcttaactatgcggcatcagagcagattgtactgagagtgcaccatatgcggtgtgaaataccgcacagatgcgtaaggagaaaataccgcatcaggcgccattcgccattcaggctgcgcaactgttgggaagggcgatcggtgcgggcctcttcgctattacgccagctggcgaaagggggatgtgctgcaaggcgattaagttgggtaacgccagggttttcccagtcacgacgttgtaaaacgacggccagtgccaagctttgtttaaaatataacaaaattgtgatcccacaaaatgaagtggggcaaaatcaaataattaactagtgtccgtaaacttgttggtcttcaactttttgaggaacacgttggacggcaaatcgtgactataacacaagttgatttaataattttagccaacacgtcgggctgcgtgttttttgcgctctgtgtacacgttgattaactggtcgattaaataatttaatttttggttcttctttaaatctgtgatgaaattttttaaaataactttaaattcttcattggtaaaaaatgccacgttttgcaacttgtgagggtctaatatgaggtcaaactcagtaggagttttatccaaaaaagaaaacatgattacgtctgtacacgaacgcgtattaacgcagagtgcaaagtataagagggttaaaaaatatattttacgcaccatatacgcatcgggttgatatcgttaatatggatcaatttgaacagttgattaacgtgtctctgctcaagtctttgatcaaaacgcaaatcgacgaaaatgtgtcggacaatatcaagtcgatgagcgaaaaactaaaaaggctagaatacgacaatctcacagacagcgttgagatatacggtattcacgacagcaggctgaataataaaaaaattagaaactattatttaaccctagaaagataatcatattgtgacgtacgttaaagataatcatgcgtaaaattgacgcatgtgttttatcggtctgtatatcgaggtttatttattaatttgaatagatattaagttttattatatttacacttacatactaataataaattcaacaaacaatttatttatgtttatttatttattaaaaaaaaacaaaaactcaaaatttcttctataaagtaacaaaacttttaaacattctctcttttacaaaaataaacttattttgtactttaaaaacagtcatgttgtattataaaataagtaattagcttaacttatacataatagaaacaaattatacttattagtcagtcagaaacaactttggcacatatcaatattatgctctcgacaaataacttttttgcattttttgcacgatgcatttgcctttcgccttattttagaggggcagtaagtacagtaagtacgttttttcattactggctcttcagtactgtcatctgatgtaccaggcacttcatttggcaaaatattagagatattatcgcgcaaatatctcttcaaagtaggagcttctaaacgcttacgcataaacgatgacgtcaggctcatgtaaaggtttctcataaattttttgcgactttgaaccttttctcccttgctactgacattatggctgtatataataaaagaatttatgcaggcaatgtttatcattccgtacaataatgccataggccacctattcgtcttcctactgcaggtcatcacagaacacatttggtctagcgtgtccactccgcctttagtttgattataatacataaccatttgcggtttaccggtactttcgttgatagaagcatcctcatcacaagatgataataagtataccatcttagctggcttcggtttatatgagacgagagtaaggggtccgtcaaaacaaaacatcgatgttcccactggcctggagcgactgtttttcagtacttccggtatctcgcgtttgtttgatcgcacggttcccacaatggttaattcgagctcgcccggggtcctaggtcgacgatgtaggtcacggtctcgaagccgcggtgcgggtgccagggcgtgcccttgggctccccgggcgcgtactccacctcacccatctggtccatcatgatgaacgggtcgaggtggcggtagttgatcccggcgaacgcgcggcgcaccgggaagccctcgccctcgaaaccgctgggcgcggtggtcacggtgagcacgggacgtgcgacggcgtcggcgggtgcggatacgcggggcagcgtcagcgggttctcgacggtcacggcgggcatgtcgacgcggccgcatgtgaatcaacattaggttgtcatgagaaacaaacatgaatgtctaaatattaaatcatgaaaatgaaaaccaactgatttgcttattaaattctaaatgtagtggctttagatagtcatgtgtgatagaacatgaatgtcatgagactgaaataagaaatttgatagaagaaatcttgctccccaaaatatggattcgaggctcctctgcttgtcgcaagctcacttgaatttttttttttaaaacaaatgagtcagcaacaagcggagcgccgcaaatccataatttgtgaagtctgggattagcatgtttcattttattcgaagctgaaagctaggaaaatctgttagtggaatccgatttttctctaacaccatgcattacatccaacgctggaagtaatgcattttatttatagaaaattagaatgaactcctcatattcactcggacatcttcactaatagaaagaaaaatgactccgcaaattttcctctaacactttcagcttcagaatttgcctctttactttggaacatgatgatgactgtcgttcgacatgaggtccatccgcaatttagttcgctatgggttgatcactacccaagtaaccaataagctgtttatatcggcaccaagtcggttctatagtcgatttaaaggcttggtcgacagagccaattggaactatatcgtaataaacggctgttataaagccacttttggcgaattatttggctgataaacagcctactcgtactgtgtctctgaaatgagtgatgtcaaaattttatagcaagtggcaaaaaaaagagaaaaaaaagttgtgtatcttctgttcgattttcatttcttttatgctccctctggagacgttttttaatttcaggctcaaactgctgtcgtctaagttcatattaatgattcccgtcgcattttctatctgctccatcgatgcacgagtggattgggatgcttaacgtcgtatttaaaagagaaatgtttgcagcgatgtgtctatttttgttctgctgaatcacgagtgatgctggcgatgccggcaaggcatttgaccatatatgtatagcagcacaaaagaagcgaaatcaacagaaaaaaaattacaatcaatttacgaatctgttcacatctttgagcatcttaaattaaaacattcctgataacgccgtttgttttgttttctgcggtgagagaaaaagaggcggagagatgtgtttcgctccattccctcgcatgttgacatttgcgtacgatatgaaatctctttcgccgtaatcccgattcagttttgttttggttgataaacgtcatgacactaggccgtttagaagcattgacggtcgttgtgtacggcttattggcacagggcttacaagcactaaaataaagcgttatatactcatatacggccaatatcagtgcctgatggtcacagtgcctataagcattcgaaaatgttttatgaagctagtaggcactgaaaatccgttaaatgtctcatataccgcttataacagtgcttgttggttacttcttcttcttctttctggcgttacgtccccactgggacagagcctgcttctcggcttagtgttcttatgagcacttccacagtaattatctgagagcttactatgccaatgaccatttttgcatgtgtatatcgtgtggcaggtacgaagatactctatgccctgggaaatcgagaaaatttccaacccgaaaatatcctcgaccggtgggattcgaacccacgaccctcagcttggtcttgctgaatagctgcgcgtttaccgctacggctatctgggcccctgggtaatgattcagaaatttggaacacggcaatcgacagcaagctcatcgatttcaaatcgaccaacttgaatatgatgatcatgacacaagataatcataagttaaacacactgaatccgtgttgggtgatgatccatagcacccataggttgacgcatacgaatttgaaatggaaagctttaggaaatcatgtggaaaactatggaattcatgttgtcggttgatgaatcagtccatgtagcaaaactaaagaattgaatgtgtaatacacatgaagtttgtaagaaaatcacaacaaatcgacatagacgttcatgaatcgatccataattttaaacacacggatcaagcgtgtggatttttttcagtggggggtgggtgggtgtcctcgtggtgttacggctcatacaaaatttgtaaactattcatataaaaagcgttacgagggggtgggtgggtgtcgaaaatggccatttttggcgttatgaaatttgtgaataaacccatagtttatttcgaatacaatacttttcactttcacagccataaaaaggacgggctgcatttgaagtttcatgacagtcgaatctggactgcatgggctcattcgcaaattttataacgctggagggggtggatgggtgtcctagggttgttacagctcatacaaaattcgaaaaacattcatacaaaatgggttacgagggggtgggtaggtatggaaaatgaccattttcggcgttatgaaatttgttgatatacccagacgttgatatatatttttcctctgcgcgagtctctctcaggttccaaccagcgaatccccgctgtaacaagcttcgactgtactttggccaccagccgcgtaaaagcttcatgaacgagctccttcgctctgatgcatgcgcagtcacaggggctccagctgtcaaatcatccggcaaaaccgaactcaaaacaaaacgtgtttgtgtgtttcgtgtgtttccgcgcgttgctttctcttggataatttcacaaagttttcgtgaattgtgccgtaaaaatcgtgttaattcaacagaatattttctgtaattgtttgccagacgcacactgtttgcacgtaagtaaaaatccacaaagattgtcaaaattctatcaagtttttaccgcaaagtcttacgtccctcagaaggctccaccctggggaaactcgagatggactataaggaccacgacggagactacaaggatcatgatattgattacaaagacgatgacgataagatggccccaaagaagaagcggaaggtcggtatccacggagtcccagcagccgacaagaagtacagcatcggcctggacatcggcaccaactctgtgggctgggccgtgatcaccgacgagtacaaggtgcccagcaagaaattcaaggtgctgggcaacaccgaccggcacagcatcaagaagaacctgatcggagccctgctgttcgacagcggcgaaacagccgaggccacccggctgaagagaaccgccagaagaagatacaccagacggaagaaccggatctgctatctgcaagagatcttcagcaacgagatggccaaggtggacgacagcttcttccacagactggaagagtccttcctggtggaagaggataagaagcacgagcggcaccccatcttcggcaacatcgtggacgaggtggcctaccacgagaagtaccccaccatctaccacctgagaaagaaactggtggacagcaccgacaaggccgacctgcggctgatctatctggccctggcccacatgatcaagttccggggccacttcctgatcgagggcgacctgaaccccgacaacagcgacgtggacaagctgttcatccagctggtgcagacctacaaccagctgttcgaggaaaaccccatcaacgccagcggcgtggacgccaaggccatcctgtctgccagactgagcaagagcagacggctggaaaatctgatcgcccagctgcccggcgagaagaagaatggcctgttcggaaacctgattgccctgagcctgggcctgacccccaacttcaagagcaacttcgacctggccgaggatgccaaactgcagctgagcaaggacacctacgacgacgacctggacaacctgctggcccagatcggcgaccagtacgccgacctgtttctggccgccaagaacctgtccgacgccatcctgctgagcgacatcctgagagtgaacaccgagatcaccaaggcccccctgagcgcctctatgatcaagagatacgacgagcaccaccaggacctgaccctgctgaaagctctcgtgcggcagcagctgcctgagaagtacaaagagattttcttcgaccagagcaagaacggctacgccggctacattgacggcggagccagccaggaagagttctacaagttcatcaagcccatcctggaaaagatggacggcaccgaggaactgctcgtgaagctgaacagagaggacctgctgcggaagcagcggaccttcgacaacggcagcatcccccaccagatccacctgggagagctgcacgccattctgcggcggcaggaagatttttacccattcctgaaggacaaccgggaaaagatcgagaagatcctgaccttccgcatcccctactacgtgggccctctggccaggggaaacagcagattcgcctggatgaccagaaagagcgaggaaaccatcaccccctggaacttcgaggaagtggtggacaagggcgcttccgcccagagcttcatcgagcggatgaccaacttcgataagaacctgcccaacgagaaggtgctgcccaagcacagcctgctgtacgagtacttcaccgtgtataacgagctgaccaaagtgaaatacgtgaccgagggaatgagaaagcccgccttcctgagcggcgagcagaaaaaggccatcgtggacctgctgttcaagaccaaccggaaagtgaccgtgaagcagctgaaagaggactacttcaagaaaatcgagtgcttcgactccgtggaaatctccggcgtggaagatcggttcaacgcctccctgggcacataccacgatctgctgaaaattatcaaggacaaggacttcctggacaatgaggaaaacgaggacattctggaagatatcgtgctgaccctgacactgtttgaggacagagagatgatcgaggaacggctgaaaacctatgcccacctgttcgacgacaaagtgatgaagcagctgaagcggcggagatacaccggctggggcaggctgagccggaagctgatcaacggcatccgggacaagcagtccggcaagacaatcctggatttcctgaagtccgacggcttcgccaacagaaacttcatgcagctgatccacgacgacagcctgacctttaaagaggacatccagaaagcccaggtgtccggccagggcgatagcctgcacgagcacattgccaatctggccggcagccccgccattaagaagggcatcctgcagacagtgaaggtggtggacgagctcgtgaaagtgatgggccggcacaagcccgagaacatcgtgatcgaaatggccagagagaaccagaccacccagaagggacagaagaacagccgcgagagaatgaagcggatcgaagagggcatcaaagagctgggcagccagatcctgaaagaacaccccgtggaaaacacccagctgcagaacgagaagctgtacctgtactacctgcagaatgggcgggatatgtacgtggaccaggaactggacatcaaccggctgtccgactacgatgtggaccatatcgtgcctcagagctttctgaaggacgactccatcgacaacaaggtgctgaccagaagcgacaagaaccggggcaagagcgacaacgtgccctccgaagaggtcgtgaagaagatgaagaactactggcggcagctgctgaacgccaagctgattacccagagaaagttcgacaatctgaccaaggccgagagaggcggcctgagcgaactggataaggccggcttcatcaagagacagctggtggaaacccggcagatcacaaagcacgtggcacagatcctggactcccggatgaacactaagtacgacgagaatgacaagctgatccgggaagtgaaagtgatcaccctgaagtccaagctggtgtccgatttccggaaggatttccagttttacaaagtgcgcgagatcaacaactaccaccacgcccacgacgcctacctgaacgccgtcgtgggaaccgccctgatcaaaaagtaccctaagctggaaagcgagttcgtgtacggcgactacaaggtgtacgacgtgcggaagatgatcgccaagagcgagcaggaaatcggcaaggctaccgccaagtacttcttctacagcaacatcatgaactttttcaagaccgagattaccctggccaacggcgagatccggaagcggcctctgatcgagacaaacggcgaaaccggggagatcgtgtgggataagggccgggattttgccaccgtgcggaaagtgctgagcatgccccaagtgaatatcgtgaaaaagaccgaggtgcagacaggcggcttcagcaaagagtctatcctgcccaagaggaacagcgataagctgatcgccagaaagaaggactgggaccctaagaagtacggcggcttcgacagccccaccgtggcctattctgtgctggtggtggccaaagtggaaaagggcaagtccaagaaactgaagagtgtgaaagagctgctggggatcaccatcatggaaagaagcagcttcgagaagaatcccatcgactttctggaagccaagggctacaaagaagtgaaaaaggacctgatcatcaagctgcctaagtactccctgttcgagctggaaaacggccggaagagaatgctggcctctgccggcgaactgcagaagggaaacgaactggccctgccctccaaatatgtgaacttcctgtacctggccagccactatgagaagctgaagggctcccccgaggataatgagcagaaacagctgtttgtggaacagcacaagcactacctggacgagatcatcgagcagatcagcgagttctccaagagagtgatcctggccgacgctaatctggacaaagtgctgtccgcctacaacaagcaccgggataagcccatcagagagcaggccgagaatatcatccacctgtttaccctgaccaatctgggagcccctgccgccttcaagtactttgacaccaccatcgaccggaagaggtacaccagcaccaaagaggtgctggacgccaccctgatccaccagagcatcaccggcctgtacgagacacggatcgacctgtctcagctgggaggcgacaaaaggccggcggccacgaaaaaggccggccaggcaaaaaagaaaaaggagggcagaggaagtcttctaacatgcggtgacgtggaggagaatcccggccctatggtgagcaagggcgaggagctgttcaccggggtggtgcccatcctggtcgagctggacggcgacgtaaacggccacaagttcagcgtgtccggcgagggcgagggcgatgccacctacggcaagctgaccctgaagttcatctgcaccaccagcaagctgcccgtgccctggcccaccctcgtgaccaccctgacctacggcgtgcagtgcttcagccgctaccccgaccacatgaagcagcacgacttcttcaagtccgccatgcccgaaggctacgtccaggagcgcaccatcttcttcaaggacgacggcaactacaagacccgcgccgaggtgaagttcgagggcgacaccctggtgaaccgcatcgagctgaagggcatcgacttcaaggaggacggcaacatcctggggcacaagctggagtacaactacaacagccacaacgtctatatcatggccgacaagcagaagaacggcatcaaggtgaacttcaagatccgccacaacatcgaggacggcagcgtgcagctcgccgaccactaccagcagaacacccccatcggcgacggccccgtgctgctgcccgacaaccactacctgagcacccagtccgccctgagcaaagaccccaacgagaagcgcgatcacatggtcctgctggagttcgtgaccgccgccgggatcactctcggcatggacgagctgtacaagtaattaattaactagaatgaatcgtttttaaaataacaaatcaattgttttataatattcgtacgattctttgattatgtaataaaatgtgatcattaggaagattacgaaaaatataaaaaatatgagttctgtgtgtataacaaatgctgtaaacgccacaattgtgtttgttgcaaataaacccatgattatttgattaaaattgttgttttctttgttcatagacaatagtgtgttttgcctaaacgtgtactgcataaactccatgcgagtgtatagcgagctagtggctaacgcttgccccaccaaagtagattcgtcaaaatcctcaatttcatcaccctcctccaagtttaacatttggccgtcggaattaacttctaaagatgccacataatctaataaatgaaatagagattcaaacgtggcgtcatcgtccgtttcgaccatttccgaaaagaactcgggcataaactctatgatttctctggacgtggtgttgtcgaaactctcaaagtacgcagtcaggaacgtgcgcgacatgtcgtcgggaaactcgcgcggaaacatgttgttgtaaccgaacgggtcccatagcgccaaaaccaaatctgccagcgtcaatagaatgagcacgatgccgacaatggagctggcttggatagcgattcgagttaacggccggggcgcgcccatactcggtggcctccccaccaccaacttttttgcactgcaaaaaaacacgcttttgcacgcgggcccatacatagtacaaactctacgtttcgtagactattttacataaatagtctacaccgttgtatacgctccaaatacactaccacacattgaacctttttgcagtgcaaaaaagtacgtgtcggcagtcacgtaggccggccttatcgggtcgcgtcctgtcacgtacgaatcacattatcggaccggacgagtgttgtcttatcgtgacaggacgccagcttcctgtgttgctaaccgcagccggacgcaactccttatcggaacaggacgcgcctccatatcagccgcgcgttatctcatgcgcgtgaccggacacgaggcgcccgtcccgcttatcgcgcctataaatacagcccgcaacgatctggtaaacacagttgaacagcatctgttacagcgacacaacatgagccggtccaacaacgccaacgcgcccacgccatccaaccgccgccgcaacctgtctctggtgatggtgcgctcctccaagaacgtcatcaaggagttcatgcgcttcaaggtgcgcatggagggcaccgtgaacggccacgagttcgagatcgagggcgagggcgagggccgcccctacgagggccacaacaccgtgaagctgaaggtgaccaagggcggccccctgcccttcgcctgggacatcctgtccccccagttccagtacggctccaaggtgtacgtgaagcaccccgccgacatccccgactacaagaagctgtccttccccgagggcttcaagtgggagcgcgtgatgaacttcgaggacggcggcgtggtgaccgtgacccaggactcctccctgcaggacggctgcttcatctacaaggtgaagttcatcggcgtgaacttcccctccgacggccccgtaatgcagaagaagaccatgggctgggaggcctccaccgagcgcctgtacccccgcgacggcgtgctgaagggcgagatccacaaggccctgaagctgaaggacggcggccactacctggtggagttcaagtccatctacatggccaagaagcccgtgcagctgcccggctactactacgtggactccaagctggacatcacctcccacaacgaggactacaccatcgtggagcagtacgagcgcaccgagggccgccaccacctgttcctgtaggactctagatcataatcagccataccacatttgtagaggttttacttgctttaaaaaacctcccacacctccccctgaacctgaaacataaaatgaatgcaattgttgttgttaacttgtttattgcagcttataatggttacaaataaagcaatagcatcacaaatttcacaaataaagcatttttttcactgcattctagttgtggtttgtccaaactcatcaatgtatcttaaagcttctaggccggccgatctcggatctgacaatgttcagtgcagagactcggctacgcctcgtggactttgaagttgaccaacaatgtttattcttacctctaatagtcctctgtggcaaggtcaagattctgttagaagccaatgaagaacctggttgttcaataacattttgttcgtctaatatttcactaccgcttgacgttggctgcacttcatgtacctcatctataaacgcttcttctgtatcgctctggacgtcatcttcacttacgtgatctgatatttcactgtcagaatcctcaccaacaagctcgtcatcgctttgcagaagagcagagaggatatgctcatcgtctaaagaactacccattttattatatattagtcacgatatctataacaagaaaatatatatataataagttatcacgtaagtagaacatgaaataacaatataattatcgtatgagttaaatcttaaaagtcacgtaaaagataatcatgcgtcattttgactcacgcggtcgttatagttcaaaatcagtgacacttaccgcattgacaagcacgcctcacgggagctccaagcggcgactgagatgtcctaaatgcacagcgacggattcgcgctatttagaaagagagagcaatatttcaagaatgcatgcgtcaattttacgcagactatctttctagggttaaaaaagatttgcgctttactcgacctaaactttaaacacgtcatagaatcttcgtttgacaaaaaccacattgtggccaagctgtgtgacgcgacgcgcgctaaagaatggcaaaccaagtcgcgcgagcgtcgactctagaggatccccgggtaccgagctcgaattcgtaatcatggtcatagctgtttcctgtgtgaaattgttatccgctcacaattccacacaacatacgagccggaagcataaagtgtaaagcctggggtgcctaatgagtgagctaactcacattaattgcgttgcgctcactgcccgctttccagtcgggaaacctgtcgtgccagctgcattaatgaatcggccaacgcgcggggagaggcggtttgcgtattgggcgctcttccgcttcctcgctcactgactcgctgcgctcggtcgttcggctgcggcgagcggtatcagctcactcaaaggcggtaatacggt

SEQ ID NO: 26 - DNA, 14141 bp, Artificial Sequence
  pBac-Aedes-Ubiq-Cas9-2a-eGFP-p10-UTR-Opie2-dsRed
tatccacagaatcaggggataacgcaggaaagaacatgtgagcaaaaggccagcaaaaggccaggaaccgtaaaaaggccgcgttgctggcgtttttccataggctccgcccccctgacgagcatcacaaaaatcgacgctcaagtcagaggtggcgaaacccgacaggactataaagataccaggcgtttccccctggaagctccctcgtgcgctctcctgttccgaccctgccgcttaccggatacctgtccgcctttctcccttcgggaagcgtggcgctttctcaatgctcacgctgtaggtatctcagttcggtgtaggtcgttcgctccaagctgggctgtgtgcacgaaccccccgttcagcccgaccgctgcgccttatccggtaactatcgtcttgagtccaacccggtaagacacgacttatcgccactggcagcagccactggtaacaggattagcagagcgaggtatgtaggcggtgctacagagttcttgaagtggtggcctaactacggctacactagaaggacagtatttggtatctgcgctctgctgaagccagttaccttcggaaaaagagttggtagctcttgatccggcaaacaaaccaccgctggtagcggtggtttttttgtttgcaagcagcagattacgcgcagaaaaaaaggatctcaagaagatcctttgatcttttctacggggtctgacgctcagtggaacgaaaactcacgttaagggattttggtcatgagattatcaaaaaggatcttcacctagatccttttaaattaaaaatgaagttttaaatcaatctaaagtatatatgagtaaacttggtctgacagttaccaatgcttaatcagtgaggcacctatctcagcgatctgtctatttcgttcatccatagttgcctgactccccgtcgtgtagataactacgatacgggagggcttaccatctggccccagtgctgcaatgataccgcgagacccacgctcaccggctccagatttatcagcaataaaccagccagccggaagggccgagcgcagaagtggtcctgcaactttatccgcctccatccagtctattaattgttgccgggaagctagagtaagtagttcgccagttaatagtttgcgcaacgttgttgccattgctacaggcatcgtggtgtcacgctcgtcgtttggtatggcttcattcagctccggttcccaacgatcaaggcgagttacatgatcccccatgttgtgcaaaaaagcggttagctccttcggtcctccgatcgttgtcagaagtaagttggccgcagtgttatcactcatggttatggcagcactgcataattctcttactgtcatgccatccgtaagatgcttttctgtgactggtgagtactcaaccaagtcattctgagaatagtgtatgcggcgaccgagttgctcttgcccggcgtcaatacgggataataccgcgccacatagcagaactttaaaagtgctcatcattggaaaacgttcttcggggcgaaaactctcaaggatcttaccgctgttgagatccagttcgatgtaacccactcgtgcacccaactgatcttcagcatcttttactttcaccagcgtttctgggtgagcaaaaacaggaaggcaaaatgccgcaaaaaagggaataagggcgacacggaaatgttgaatactcatactcttcctttttcaatattattgaagcatttatcagggttattgtctcatgagcggatacatatttgaatgtatttagaaaaataaacaaataggggttccgcgcacatttccccgaaaagtgccacctgacgtctaagaaaccattattatcatgacattaacctataaaaataggcgtatcacgaggccctttcgtctcgcgcgtttcggtgatgacggtgaaaacctctgacacatgcagctcccggagacggtcacagcttgtctgtaagcggatgccgggagcagacaagcccgtcagggcgcgtcagcgggtgttggcgggtgtcggggctggcttaactatgcggcatcagagcagattgtactgagagtgcaccatatgcggtgtgaaataccgcacagatgcgtaaggagaaaataccgcatcaggcgccattcgccattcaggctgcgcaactgttgggaagggcgatcggtgcgggcctcttcgctattacgccagctggcgaaagggggatgtgctgcaaggcgattaagttgggtaacgccagggttttcccagtcacgacgttgtaaaacgacggccagtgccaagctttgtttaaaatataacaaaattgtgatcccacaaaatgaagtggggcaaaatcaaataattaactagtgtccgtaaacttgttggtcttcaactttttgaggaacacgttggacggcaaatcgtgactataacacaagttgatttaataattttagccaacacgtcgggctgcgtgttttttgcgctctgtgtacacgttgattaactggtcgattaaataatttaatttttggttcttctttaaatctgtgatgaaattttttaaaataactttaaattcttcattggtaaaaaatgccacgttttgcaacttgtgagggtctaatatgaggtcaaactcagtaggagttttatccaaaaaagaaaacatgattacgtctgtacacgaacgcgtattaacgcagagtgcaaagtataagagggttaaaaaatatattttacgcaccatatacgcatcgggttgatatcgttaatatggatcaatttgaacagttgattaacgtgtctctgctcaagtctttgatcaaaacgcaaatcgacgaaaatgtgtcggacaatatcaagtcgatgagcgaaaaactaaaaaggctagaatacgacaatctcacagacagcgttgagatatacggtattcacgacagcaggctgaataataaaaaaattagaaactattatttaaccctagaaagataatcatattgtgacgtacgttaaagataatcatgcgtaaaattgacgcatgtgttttatcggtctgtatatcgaggtttatttattaatttgaatagatattaagttttattatatttacacttacatactaataataaattcaacaaacaatttatttatgtttatttatttattaaaaaaaaacaaaaactcaaaatttcttctataaagtaacaaaacttttaaacattctctcttttacaaaaataaacttattttgtactttaaaaacagtcatgttgtattataaaataagtaattagcttaacttatacataatagaaacaaattatacttattagtcagtcagaaacaactttggcacatatcaatattatgctctcgacaaataacttttttgcattttttgcacgatgcatttgcctttcgccttattttagaggggcagtaagtacagtaagtacgttttttcattactggctcttcagtactgtcatctgatgtaccaggcacttcatttggcaaaatattagagatattatcgcgcaaatatctcttcaaagtaggagcttctaaacgcttacgcataaacgatgacgtcaggctcatgtaaaggtttctcataaattttttgcgactttgaaccttttctcccttgctactgacattatggctgtatataataaaagaatttatgcaggcaatgtttatcattccgtacaataatgccataggccacctattcgtcttcctactgcaggtcatcacagaacacatttggtctagcgtgtccactccgcctttagtttgattataatacataaccatttgcggtttaccggtactttcgttgatagaagcatcctcatcacaagatgataataagtataccatcttagctggcttcggtttatatgagacgagagtaaggggtccgtcaaaacaaaacatcgatgttcccactggcctggagcgactgtttttcagtacttccggtatctcgcgtttgtttgatcgcacggttcccacaatggttaattcgagctcgcccggggtcctaggtcgacgatgtaggtcacggtctcgaagccgcggtgcgggtgccagggcgtgcccttgggctccccgggcgcgtactccacctcacccatctggtccatcatgatgaacgggtcgaggtggcggtagttgatcccggcgaacgcgcggcgcaccgggaagccctcgccctcgaaaccgctgggcgcggtggtcacggtgagcacgggacgtgcgacggcgtcggcgggtgcggatacgcggggcagcgtcagcgggttctcgacggtcacggcgggcatgtcgacgcggccgctatctttacatgtagcttgtgcattgaatccaattataatttgccttggcaccagctgagccagacaagaaagaaagcttcccagaagtatatcgatttagaagggttgacgtcactttgctgactgcactaatacagcaaatgatacaattagaatgattcaagtgaaattcccaaattactgctttgtctctggatttggttatcagattacattcgaagctaagaatagctaccgaaattgtcgatcaaatcaggaaatcctttctctatcgaaaaaggcattcgcacatctttctctgtatgccatatacacgaatggtaggtacattgacgtctttgccagaagttgaactgcatcgttcaaggtacagaatgaacgactaacagacacaagcacgttttgctgtccattcagacacagggatggtacccatagtcgatcgatttagagccatccaaccgaacagaggtatatgtatgaatggattgcagaaattttctagaagtacaaccaccactacggcagtgtctataaaacgcccctgcaaaggcaaaaccagctcaatcgaatacgtttcctagtggagtgaacattacgcggtccaagtaagcagtgccagtgcaagtgaagtgaagtctctagtgaaaaagagtgatccaattagccagaggagaaaatttcagagtgaacaaagctttgttcaaaggacaattactattaaatttgtgaaagtgcatttcggtgaagggaatcttctagtgaaggtaggtaaattaaatgatgaaattatagctatgagcgaaaactagtttggtgaatgattcctttgtctttgaatgagcaaactattttccaagatggcgactattgagctttgagtgattagtgaaaatttgcaacgcagtttcatcatcattgataaaacccaattgtgattcacggcgataatcatatttcgttgaatcatcgctgctaattgaattaaatttctagagcaagcgcgaattcgccatatttctaaaattaaatattgtggtgataattacccattaaggtaatattaacacatatcgagaaaaaccttgaggaaatcgtgaaaacttgaagatacgcaatttccaaactacgtagttcaaagtcgaaaacaagttaatttttcactaaaaagtagggcgttgttgtgacgtcatcaccttcaagtgtatatttttcacttggcctgcgactgcaaacgcagacaaagcaaaacaagtttaaaacctgtcgtgtcgtgctcgaagccaaaggcaatgaatcaatatcaaatgagagtttgcatttcacaaccaattactgaagcgtttcctcgtttctttttctgctcaacagagatttcaacgaatctcgagatggactataaggaccacgacggagactacaaggatcatgatattgattacaaagacgatgacgataagatggccccaaagaagaagcggaaggtcggtatccacggagtcccagcagccgacaagaagtacagcatcggcctggacatcggcaccaactctgtgggctgggccgtgatcaccgacgagtacaaggtgcccagcaagaaattcaaggtgctgggcaacaccgaccggcacagcatcaagaagaacctgatcggagccctgctgttcgacagcggcgaaacagccgaggccacccggctgaagagaaccgccagaagaagatacaccagacggaagaaccggatctgctatctgcaagagatcttcagcaacgagatggccaaggtggacgacagcttcttccacagactggaagagtccttcctggtggaagaggataagaagcacgagcggcaccccatcttcggcaacatcgtggacgaggtggcctaccacgagaagtaccccaccatctaccacctgagaaagaaactggtggacagcaccgacaaggccgacctgcggctgatctatctggccctggcccacatgatcaagttccggggccacttcctgatcgagggcgacctgaaccccgacaacagcgacgtggacaagctgttcatccagctggtgcagacctacaaccagctgttcgaggaaaaccccatcaacgccagcggcgtggacgccaaggccatcctgtctgccagactgagcaagagcagacggctggaaaatctgatcgcccagctgcccggcgagaagaagaatggcctgttcggaaacctgattgccctgagcctgggcctgacccccaacttcaagagcaacttcgacctggccgaggatgccaaactgcagctgagcaaggacacctacgacgacgacctggacaacctgctggcccagatcggcgaccagtacgccgacctgtttctggccgccaagaacctgtccgacgccatcctgctgagcgacatcctgagagtgaacaccgagatcaccaaggcccccctgagcgcctctatgatcaagagatacgacgagcaccaccaggacctgaccctgctgaaagctctcgtgcggcagcagctgcctgagaagtacaaagagattttcttcgaccagagcaagaacggctacgccggctacattgacggcggagccagccaggaagagttctacaagttcatcaagcccatcctggaaaagatggacggcaccgaggaactgctcgtgaagctgaacagagaggacctgctgcggaagcagcggaccttcgacaacggcagcatcccccaccagatccacctgggagagctgcacgccattctgcggcggcaggaagatttttacccattcctgaaggacaaccgggaaaagatcgagaagatcctgaccttccgcatcccctactacgtgggccctctggccaggggaaacagcagattcgcctggatgaccagaaagagcgaggaaaccatcaccccctggaacttcgaggaagtggtggacaagggcgcttccgcccagagcttcatcgagcggatgaccaacttcgataagaacctgcccaacgagaaggtgctgcccaagcacagcctgctgtacgagtacttcaccgtgtataacgagctgaccaaagtgaaatacgtgaccgagggaatgagaaagcccgccttcctgagcggcgagcagaaaaaggccatcgtggacctgctgttcaagaccaaccggaaagtgaccgtgaagcagctgaaagaggactacttcaagaaaatcgagtgcttcgactccgtggaaatctccggcgtggaagatcggttcaacgcctccctgggcacataccacgatctgctgaaaattatcaaggacaaggacttcctggacaatgaggaaaacgaggacattctggaagatatcgtgctgaccctgacactgtttgaggacagagagatgatcgaggaacggctgaaaacctatgcccacctgttcgacgacaaagtgatgaagcagctgaagcggcggagatacaccggctggggcaggctgagccggaagctgatcaacggcatccgggacaagcagtccggcaagacaatcctggatttcctgaagtccgacggcttcgccaacagaaacttcatgcagctgatccacgacgacagcctgacctttaaagaggacatccagaaagcccaggtgtccggccagggcgatagcctgcacgagcacattgccaatctggccggcagccccgccattaagaagggcatcctgcagacagtgaaggtggtggacgagctcgtgaaagtgatgggccggcacaagcccgagaacatcgtgatcgaaatggccagagagaaccagaccacccagaagggacagaagaacagccgcgagagaatgaagcggatcgaagagggcatcaaagagctgggcagccagatcctgaaagaacaccccgtggaaaacacccagctgcagaacgagaagctgtacctgtactacctgcagaatgggcgggatatgtacgtggaccaggaactggacatcaaccggctgtccgactacgatgtggaccatatcgtgcctcagagctttctgaaggacgactccatcgacaacaaggtgctgaccagaagcgacaagaaccggggcaagagcgacaacgtgccctccgaagaggtcgtgaagaagatgaagaactactggcggcagctgctgaacgccaagctgattacccagagaaagttcgacaatctgaccaaggccgagagaggcggcctgagcgaactggataaggccggcttcatcaagagacagctggtggaaacccggcagatcacaaagcacgtggcacagatcctggactcccggatgaacactaagtacgacgagaatgacaagctgatccgggaagtgaaagtgatcaccctgaagtccaagctggtgtccgatttccggaaggatttccagttttacaaagtgcgcgagatcaacaactaccaccacgcccacgacgcctacctgaacgccgtcgtgggaaccgccctgatcaaaaagtaccctaagctggaaagcgagttcgtgtacggcgactacaaggtgtacgacgtgcggaagatgatcgccaagagcgagcaggaaatcggcaaggctaccgccaagtacttcttctacagcaacatcatgaactttttcaagaccgagattaccctggccaacggcgagatccggaagcggcctctgatcgagacaaacggcgaaaccggggagatcgtgtgggataagggccgggattttgccaccgtgcggaaagtgctgagcatgccccaagtgaatatcgtgaaaaagaccgaggtgcagacaggcggcttcagcaaagagtctatcctgcccaagaggaacagcgataagctgatcgccagaaagaaggactgggaccctaagaagtacggcggcttcgacagccccaccgtggcctattctgtgctggtggtggccaaagtggaaaagggcaagtccaagaaactgaagagtgtgaaagagctgctggggatcaccatcatggaaagaagcagcttcgagaagaatcccatcgactttctggaagccaagggctacaaagaagtgaaaaaggacctgatcatcaagctgcctaagtactccctgttcgagctggaaaacggccggaagagaatgctggcctctgccggcgaactgcagaagggaaacgaactggccctgccctccaaatatgtgaacttcctgtacctggccagccactatgagaagctgaagggctcccccgaggataatgagcagaaacagctgtttgtggaacagcacaagcactacctggacgagatcatcgagcagatcagcgagttctccaagagagtgatcctggccgacgctaatctggacaaagtgctgtccgcctacaacaagcaccgggataagcccatcagagagcaggccgagaatatcatccacctgtttaccctgaccaatctgggagcccctgccgccttcaagtactttgacaccaccatcgaccggaagaggtacaccagcaccaaagaggtgctggacgccaccctgatccaccagagcatcaccggcctgtacgagacacggatcgacctgtctcagctgggaggcgacaaaaggccggcggccacgaaaaaggccggccaggcaaaaaagaaaaaggagggcagaggaagtcttctaacatgcggtgacgtggaggagaatcccggccctatggtgagcaagggcgaggagctgttcaccggggtggtgcccatcctggtcgagctggacggcgacgtaaacggccacaagttcagcgtgtccggcgagggcgagggcgatgccacctacggcaagctgaccctgaagttcatctgcaccaccagcaagctgcccgtgccctggcccaccctcgtgaccaccctgacctacggcgtgcagtgcttcagccgctaccccgaccacatgaagcagcacgacttcttcaagtccgccatgcccgaaggctacgtccaggagcgcaccatcttcttcaaggacgacggcaactacaagacccgcgccgaggtgaagttcgagggcgacaccctggtgaaccgcatcgagctgaagggcatcgacttcaaggaggacggcaacatcctggggcacaagctggagtacaactacaacagccacaacgtctatatcatggccgacaagcagaagaacggcatcaaggtgaacttcaagatccgccacaacatcgaggacggcagcgtgcagctcgccgaccactaccagcagaacacccccatcggcgacggccccgtgctgctgcccgacaaccactacctgagcacccagtccgccctgagcaaagaccccaacgagaagcgcgatcacatggtcctgctggagttcgtgaccgccgccgggatcactctcggcatggacgagctgtacaagtaattaattaactagaatgaatcgtttttaaaataacaaatcaattgttttataatattcgtacgattctttgattatgtaataaaatgtgatcattaggaagattacgaaaaatataaaaaatatgagttctgtgtgtataacaaatgctgtaaacgccacaattgtgtttgttgcaaataaacccatgattatttgattaaaattgttgttttctttgttcatagacaatagtgtgttttgcctaaacgtgtactgcataaactccatgcgagtgtatagcgagctagtggctaacgcttgccccaccaaagtagattcgtcaaaatcctcaatttcatcaccctcctccaagtttaacatttggccgtcggaattaacttctaaagatgccacataatctaataaatgaaatagagattcaaacgtggcgtcatcgtccgtttcgaccatttccgaaaagaactcgggcataaactctatgatttctctggacgtggtgttgtcgaaactctcaaagtacgcagtcaggaacgtgcgcgacatgtcgtcgggaaactcgcgcggaaacatgttgttgtaaccgaacgggtcccatagcgccaaaaccaaatctgccagcgtcaatagaatgagcacgatgccgacaatggagctggcttggatagcgattcgagttaacggccggggcgcgcccatactcggtggcctccccaccaccaacttttttgcactgcaaaaaaacacgcttttgcacgcgggcccatacatagtacaaactctacgtttcgtagactattttacataaatagtctacaccgttgtatacgctccaaatacactaccacacattgaacctttttgcagtgcaaaaaagtacgtgtcggcagtcacgtaggccggccttatcgggtcgcgtcctgtcacgtacgaatcacattatcggaccggacgagtgttgtcttatcgtgacaggacgccagcttcctgtgttgctaaccgcagccggacgcaactccttatcggaacaggacgcgcctccatatcagccgcgcgttatctcatgcgcgtgaccggacacgaggcgcccgtcccgcttatcgcgcctataaatacagcccgcaacgatctggtaaacacagttgaacagcatctgttacagcgacacaacatgagccggtccaacaacgccaacgcgcccacgccatccaaccgccgccgcaacctgtctctggtgatggtgcgctcctccaagaacgtcatcaaggagttcatgcgcttcaaggtgcgcatggagggcaccgtgaacggccacgagttcgagatcgagggcgagggcgagggccgcccctacgagggccacaacaccgtgaagctgaaggtgaccaagggcggccccctgcccttcgcctgggacatcctgtccccccagttccagtacggctccaaggtgtacgtgaagcaccccgccgacatccccgactacaagaagctgtccttccccgagggcttcaagtgggagcgcgtgatgaacttcgaggacggcggcgtggtgaccgtgacccaggactcctccctgcaggacggctgcttcatctacaaggtgaagttcatcggcgtgaacttcccctccgacggccccgtaatgcagaagaagaccatgggctgggaggcctccaccgagcgcctgtacccccgcgacggcgtgctgaagggcgagatccacaaggccctgaagctgaaggacggcggccactacctggtggagttcaagtccatctacatggccaagaagcccgtgcagctgcccggctactactacgtggactccaagctggacatcacctcccacaacgaggactacaccatcgtggagcagtacgagcgcaccgagggccgccaccacctgttcctgtaggactctagatcataatcagccataccacatttgtagaggttttacttgctttaaaaaacctcccacacctccccctgaacctgaaacataaaatgaatgcaattgttgttgttaacttgtttattgcagcttataatggttacaaataaagcaatagcatcacaaatttcacaaataaagcatttttttcactgcattctagttgtggtttgtccaaactcatcaatgtatcttaaagcttctaggccggccgatctcggatctgacaatgttcagtgcagagactcggctacgcctcgtggactttgaagttgaccaacaatgtttattcttacctctaatagtcctctgtggcaaggtcaagattctgttagaagccaatgaagaacctggttgttcaataacattttgttcgtctaatatttcactaccgcttgacgttggctgcacttcatgtacctcatctataaacgcttcttctgtatcgctctggacgtcatcttcacttacgtgatctgatatttcactgtcagaatcctcaccaacaagctcgtcatcgctttgcagaagagcagagaggatatgctcatcgtctaaagaactacccattttattatatattagtcacgatatctataacaagaaaatatatatataataagttatcacgtaagtagaacatgaaataacaatataattatcgtatgagttaaatcttaaaagtcacgtaaaagataatcatgcgtcattttgactcacgcggtcgttatagttcaaaatcagtgacacttaccgcattgacaagcacgcctcacgggagctccaagcggcgactgagatgtcctaaatgcacagcgacggattcgcgctatttagaaagagagagcaatatttcaagaatgcatgcgtcaattttacgcagactatctttctagggttaaaaaagatttgcgctttactcgacctaaactttaaacacgtcatagaatcttcgtttgacaaaaaccacattgtggccaagctgtgtgacgcgacgcgcgctaaagaatggcaaaccaagtcgcgcgagcgtcgactctagaggatccccgggtaccgagctcgaattcgtaatcatggtcatagctgtttcctgtgtgaaattgttatccgctcacaattccacacaacatacgagccggaagcataaagtgtaaagcctggggtgcctaatgagtgagctaactcacattaattgcgttgcgctcactgcccgctttccagtcgggaaacctgtcgtgccagctgcattaatgaatcggccaacgcgcggggagaggcggtttgcgtattgggcgctcttccgcttcctcgctcactgactcgctgcgctcggtcgttcggctgcggcgagcggtatcagctcactcaaaggcggtaatacggt

SEQ ID NO: 27 - DNA, 13176 bp, Artificial Sequence
  pBac-Aedes-Ubiq (AAEL006511)-Cas9-2a-eGFP-p10-UTR-Opie2-dsRed
tatccacagaatcaggggataacgcaggaaagaacatgtgagcaaaaggccagcaaaaggccaggaaccgtaaaaaggccgcgttgctggcgtttttccataggctccgcccccctgacgagcatcacaaaaatcgacgctcaagtcagaggtggcgaaacccgacaggactataaagataccaggcgtttccccctggaagctccctcgtgcgctctcctgttccgaccctgccgcttaccggatacctgtccgcctttctcccttcgggaagcgtggcgctttctcaatgctcacgctgtaggtatctcagttcggtgtaggtcgttcgctccaagctgggctgtgtgcacgaaccccccgttcagcccgaccgctgcgccttatccggtaactatcgtcttgagtccaacccggtaagacacgacttatcgccactggcagcagccactggtaacaggattagcagagcgaggtatgtaggcggtgctacagagttcttgaagtggtggcctaactacggctacactagaaggacagtatttggtatctgcgctctgctgaagccagttaccttcggaaaaagagttggtagctcttgatccggcaaacaaaccaccgctggtagcggtggtttttttgtttgcaagcagcagattacgcgcagaaaaaaaggatctcaagaagatcctttgatcttttctacggggtctgacgctcagtggaacgaaaactcacgttaagggattttggtcatgagattatcaaaaaggatcttcacctagatccttttaaattaaaaatgaagttttaaatcaatctaaagtatatatgagtaaacttggtctgacagttaccaatgcttaatcagtgaggcacctatctcagcgatctgtctatttcgttcatccatagttgcctgactccccgtcgtgtagataactacgatacgggagggcttaccatctggccccagtgctgcaatgataccgcgagacccacgctcaccggctccagatttatcagcaataaaccagccagccggaagggccgagcgcagaagtggtcctgcaactttatccgcctccatccagtctattaattgttgccgggaagctagagtaagtagttcgccagttaatagtttgcgcaacgttgttgccattgctacaggcatcgtggtgtcacgctcgtcgtttggtatggcttcattcagctccggttcccaacgatcaaggcgagttacatgatcccccatgttgtgcaaaaaagcggttagctccttcggtcctccgatcgttgtcagaagtaagttggccgcagtgttatcactcatggttatggcagcactgcataattctcttactgtcatgccatccgtaagatgcttttctgtgactggtgagtactcaaccaagtcattctgagaatagtgtatgcggcgaccgagttgctcttgcccggcgtcaatacgggataataccgcgccacatagcagaactttaaaagtgctcatcattggaaaacgttcttcggggcgaaaactctcaaggatcttaccgctgttgagatccagttcgatgtaacccactcgtgcacccaactgatcttcagcatcttttactttcaccagcgtttctgggtgagcaaaaacaggaaggcaaaatgccgcaaaaaagggaataagggcgacacggaaatgttgaatactcatactcttcctttttcaatattattgaagcatttatcagggttattgtctcatgagcggatacatatttgaatgtatttagaaaaataaacaaataggggttccgcgcacatttccccgaaaagtgccacctgacgtctaagaaaccattattatcatgacattaacctataaaaataggcgtatcacgaggccctttcgtctcgcgcgtttcggtgatgacggtgaaaacctctgacacatgcagctcccggagacggtcacagcttgtctgtaagcggatgccgggagcagacaagcccgtcagggcgcgtcagcgggtgttggcgggtgtcggggctggcttaactatgcggcatcagagcagattgtactgagagtgcaccatatgcggtgtgaaataccgcacagatgcgtaaggagaaaataccgcatcaggcgccattcgccattcaggctgcgcaactgttgggaagggcgatcggtgcgggcctcttcgctattacgccagctggcgaaagggggatgtgctgcaaggcgattaagttgggtaacgccagggttttcccagtcacgacgttgtaaaacgacggccagtgccaagctttgtttaaaatataacaaaattgtgatcccacaaaatgaagtggggcaaaatcaaataattaactagtgtccgtaaacttgttggtcttcaactttttgaggaacacgttggacggcaaatcgtgactataacacaagttgatttaataattttagccaacacgtcgggctgcgtgttttttgcgctctgtgtacacgttgattaactggtcgattaaataatttaatttttggttcttctttaaatctgtgatgaaattttttaaaataactttaaattcttcattggtaaaaaatgccacgttttgcaacttgtgagggtctaatatgaggtcaaactcagtaggagttttatccaaaaaagaaaacatgattacgtctgtacacgaacgcgtattaacgcagagtgcaaagtataagagggttaaaaaatatattttacgcaccatatacgcatcgggttgatatcgttaatatggatcaatttgaacagttgattaacgtgtctctgctcaagtctttgatcaaaacgcaaatcgacgaaaatgtgtcggacaatatcaagtcgatgagcgaaaaactaaaaaggctagaatacgacaatctcacagacagcgttgagatatacggtattcacgacagcaggctgaataataaaaaaattagaaactattatttaaccctagaaagataatcatattgtgacgtacgttaaagataatcatgcgtaaaattgacgcatgtgttttatcggtctgtatatcgaggtttatttattaatttgaatagatattaagttttattatatttacacttacatactaataataaattcaacaaacaatttatttatgtttatttatttattaaaaaaaaacaaaaactcaaaatttcttctataaagtaacaaaacttttaaacattctctcttttacaaaaataaacttattttgtactttaaaaacagtcatgttgtattataaaataagtaattagcttaacttatacataatagaaacaaattatacttattagtcagtcagaaacaactttggcacatatcaatattatgctctcgacaaataacttttttgcattttttgcacgatgcatttgcctttcgccttattttagaggggcagtaagtacagtaagtacgttttttcattactggctcttcagtactgtcatctgatgtaccaggcacttcatttggcaaaatattagagatattatcgcgcaaatatctcttcaaagtaggagcttctaaacgcttacgcataaacgatgacgtcaggctcatgtaaaggtttctcataaattttttgcgactttgaaccttttctcccttgctactgacattatggctgtatataataaaagaatttatgcaggcaatgtttatcattccgtacaataatgccataggccacctattcgtcttcctactgcaggtcatcacagaacacatttggtctagcgtgtccactccgcctttagtttgattataatacataaccatttgcggtttaccggtactttcgttgatagaagcatcctcatcacaagatgataataagtataccatcttagctggcttcggtttatatgagacgagagtaaggggtccgtcaaaacaaaacatcgatgttcccactggcctggagcgactgtttttcagtacttccggtatctcgcgtttgtttgatcgcacggttcccacaatggttaattcgagctcgcccggggtcctaggtcgacgatgtaggtcacggtctcgaagccgcggtgcgggtgccagggcgtgcccttgggctccccgggcgcgtactccacctcacccatctggtccatcatgatgaacgggtcgaggtggcggtagttgatcccggcgaacgcgcggcgcaccgggaagccctcgccctcgaaaccgctgggcgcggtggtcacggtgagcacgggacgtgcgacggcgtcggcgggtgcggatacgcggggcagcgtcagcgggttctcgacggtcacggcgggcatgtcgacgcggccgcagcgtgaaccttgcatgcgtgcacagaatttgattgcatttcatgaccgggtatccattcggcgccggccactgaactgaaattcagttttgacagctccactgacttgaagctctttttcaccgaaacacatctcggaagagacacgttgggaaagagtaagtttaatttttgtcgtttttcgtggatttttagtgataattcgtggtttttcgttgttagcaatctaaatcattgatagatcaagttagaaattgtgaaatattgctaaaatacctacattattcgtagtttattcgatttgttgtagttgatgcattctaacctcaatgtggtttcgtctccgtccaattccgatgttattgtccagttcgttaatttttggtgttttctccccgacttttccacagactgatccaagctcgagatggactataaggaccacgacggagactacaaggatcatgatattgattacaaagacgatgacgataagatggccccaaagaagaagcggaaggtcggtatccacggagtcccagcagccgacaagaagtacagcatcggcctggacatcggcaccaactctgtgggctgggccgtgatcaccgacgagtacaaggtgcccagcaagaaattcaaggtgctgggcaacaccgaccggcacagcatcaagaagaacctgatcggagccctgctgttcgacagcggcgaaacagccgaggccacccggctgaagagaaccgccagaagaagatacaccagacggaagaaccggatctgctatctgcaagagatcttcagcaacgagatggccaaggtggacgacagcttcttccacagactggaagagtccttcctggtggaagaggataagaagcacgagcggcaccccatcttcggcaacatcgtggacgaggtggcctaccacgagaagtaccccaccatctaccacctgagaaagaaactggtggacagcaccgacaaggccgacctgcggctgatctatctggccctggcccacatgatcaagttccggggccacttcctgatcgagggcgacctgaaccccgacaacagcgacgtggacaagctgttcatccagctggtgcagacctacaaccagctgttcgaggaaaaccccatcaacgccagcggcgtggacgccaaggccatcctgtctgccagactgagcaagagcagacggctggaaaatctgatcgcccagctgcccggcgagaagaagaatggcctgttcggaaacctgattgccctgagcctgggcctgacccccaacttcaagagcaacttcgacctggccgaggatgccaaactgcagctgagcaaggacacctacgacgacgacctggacaacctgctggcccagatcggcgaccagtacgccgacctgtttctggccgccaagaacctgtccgacgccatcctgctgagcgacatcctgagagtgaacaccgagatcaccaaggcccccctgagcgcctctatgatcaagagatacgacgagcaccaccaggacctgaccctgctgaaagctctcgtgcggcagcagctgcctgagaagtacaaagagattttcttcgaccagagcaagaacggctacgccggctacattgacggcggagccagccaggaagagttctacaagttcatcaagcccatcctggaaaagatggacggcaccgaggaactgctcgtgaagctgaacagagaggacctgctgcggaagcagcggaccttcgacaacggcagcatcccccaccagatccacctgggagagctgcacgccattctgcggcggcaggaagatttttacccattcctgaaggacaaccgggaaaagatcgagaagatcctgaccttccgcatcccctactacgtgggccctctggccaggggaaacagcagattcgcctggatgaccagaaagagcgaggaaaccatcaccccctggaacttcgaggaagtggtggacaagggcgcttccgcccagagcttcatcgagcggatgaccaacttcgataagaacctgcccaacgagaaggtgctgcccaagcacagcctgctgtacgagtacttcaccgtgtataacgagctgaccaaagtgaaatacgtgaccgagggaatgagaaagcccgccttcctgagcggcgagcagaaaaaggccatcgtggacctgctgttcaagaccaaccggaaagtgaccgtgaagcagctgaaagaggactacttcaagaaaatcgagtgcttcgactccgtggaaatctccggcgtggaagatcggttcaacgcctccctgggcacataccacgatctgctgaaaattatcaaggacaaggacttcctggacaatgaggaaaacgaggacattctggaagatatcgtgctgaccctgacactgtttgaggacagagagatgatcgaggaacggctgaaaacctatgcccacctgttcgacgacaaagtgatgaagcagctgaagcggcggagatacaccggctggggcaggctgagccggaagctgatcaacggcatccgggacaagcagtccggcaagacaatcctggatttcctgaagtccgacggcttcgccaacagaaacttcatgcagctgatccacgacgacagcctgacctttaaagaggacatccagaaagcccaggtgtccggccagggcgatagcctgcacgagcacattgccaatctggccggcagccccgccattaagaagggcatcctgcagacagtgaaggtggtggacgagctcgtgaaagtgatgggccggcacaagcccgagaacatcgtgatcgaaatggccagagagaaccagaccacccagaagggacagaagaacagccgcgagagaatgaagcggatcgaagagggcatcaaagagctgggcagccagatcctgaaagaacaccccgtggaaaacacccagctgcagaacgagaagctgtacctgtactacctgcagaatgggcgggatatgtacgtggaccaggaactggacatcaaccggctgtccgactacgatgtggaccatatcgtgcctcagagctttctgaaggacgactccatcgacaacaaggtgctgaccagaagcgacaagaaccggggcaagagcgacaacgtgccctccgaagaggtcgtgaagaagatgaagaactactggcggcagctgctgaacgccaagctgattacccagagaaagttcgacaatctgaccaaggccgagagaggcggcctgagcgaactggataaggccggcttcatcaagagacagctggtggaaacccggcagatcacaaagcacgtggcacagatcctggactcccggatgaacactaagtacgacgagaatgacaagctgatccgggaagtgaaagtgatcaccctgaagtccaagctggtgtccgatttccggaaggatttccagttttacaaagtgcgcgagatcaacaactaccaccacgcccacgacgcctacctgaacgccgtcgtgggaaccgccctgatcaaaaagtaccctaagctggaaagcgagttcgtgtacggcgactacaaggtgtacgacgtgcggaagatgatcgccaagagcgagcaggaaatcggcaaggctaccgccaagtacttcttctacagcaacatcatgaactttttcaagaccgagattaccctggccaacggcgagatccggaagcggcctctgatcgagacaaacggcgaaaccggggagatcgtgtgggataagggccgggattttgccaccgtgcggaaagtgctgagcatgccccaagtgaatatcgtgaaaaagaccgaggtgcagacaggcggcttcagcaaagagtctatcctgcccaagaggaacagcgataagctgatcgccagaaagaaggactgggaccctaagaagtacggcggcttcgacagccccaccgtggcctattctgtgctggtggtggccaaagtggaaaagggcaagtccaagaaactgaagagtgtgaaagagctgctggggatcaccatcatggaaagaagcagcttcgagaagaatcccatcgactttctggaagccaagggctacaaagaagtgaaaaaggacctgatcatcaagctgcctaagtactccctgttcgagctggaaaacggccggaagagaatgctggcctctgccggcgaactgcagaagggaaacgaactggccctgccctccaaatatgtgaacttcctgtacctggccagccactatgagaagctgaagggctcccccgaggataatgagcagaaacagctgtttgtggaacagcacaagcactacctggacgagatcatcgagcagatcagcgagttctccaagagagtgatcctggccgacgctaatctggacaaagtgctgtccgcctacaacaagcaccgggataagcccatcagagagcaggccgagaatatcatccacctgtttaccctgaccaatctgggagcccctgccgccttcaagtactttgacaccaccatcgaccggaagaggtacaccagcaccaaagaggtgctggacgccaccctgatccaccagagcatcaccggcctgtacgagacacggatcgacctgtctcagctgggaggcgacaaaaggccggcggccacgaaaaaggccggccaggcaaaaaagaaaaaggagggcagaggaagtcttctaacatgcggtgacgtggaggagaatcccggccctatggtgagcaagggcgaggagctgttcaccggggtggtgcccatcctggtcgagctggacggcgacgtaaacggccacaagttcagcgtgtccggcgagggcgagggcgatgccacctacggcaagctgaccctgaagttcatctgcaccaccagcaagctgcccgtgccctggcccaccctcgtgaccaccctgacctacggcgtgcagtgcttcagccgctaccccgaccacatgaagcagcacgacttcttcaagtccgccatgcccgaaggctacgtccaggagcgcaccatcttcttcaaggacgacggcaactacaagacccgcgccgaggtgaagttcgagggcgacaccctggtgaaccgcatcgagctgaagggcatcgacttcaaggaggacggcaacatcctggggcacaagctggagtacaactacaacagccacaacgtctatatcatggccgacaagcagaagaacggcatcaaggtgaacttcaagatccgccacaacatcgaggacggcagcgtgcagctcgccgaccactaccagcagaacacccccatcggcgacggccccgtgctgctgcccgacaaccactacctgagcacccagtccgccctgagcaaagaccccaacgagaagcgcgatcacatggtcctgctggagttcgtgaccgccgccgggatcactctcggcatggacgagctgtacaagtaattaattaactagaatgaatcgtttttaaaataacaaatcaattgttttataatattcgtacgattctttgattatgtaataaaatgtgatcattaggaagattacgaaaaatataaaaaatatgagttctgtgtgtataacaaatgctgtaaacgccacaattgtgtttgttgcaaataaacccatgattatttgattaaaattgttgttttctttgttcatagacaatagtgtgttttgcctaaacgtgtactgcataaactccatgcgagtgtatagcgagctagtggctaacgcttgccccaccaaagtagattcgtcaaaatcctcaatttcatcaccctcctccaagtttaacatttggccgtcggaattaacttctaaagatgccacataatctaataaatgaaatagagattcaaacgtggcgtcatcgtccgtttcgaccatttccgaaaagaactcgggcataaactctatgatttctctggacgtggtgttgtcgaaactctcaaagtacgcagtcaggaacgtgcgcgacatgtcgtcgggaaactcgcgcggaaacatgttgttgtaaccgaacgggtcccatagcgccaaaaccaaatctgccagcgtcaatagaatgagcacgatgccgacaatggagctggcttggatagcgattcgagttaacggccggggcgcgcccatactcggtggcctccccaccaccaacttttttgcactgcaaaaaaacacgcttttgcacgcgggcccatacatagtacaaactctacgtttcgtagactattttacataaatagtctacaccgttgtatacgctccaaatacactaccacacattgaacctttttgcagtgcaaaaaagtacgtgtcggcagtcacgtaggccggccttatcgggtcgcgtcctgtcacgtacgaatcacattatcggaccggacgagtgttgtcttatcgtgacaggacgccagcttcctgtgttgctaaccgcagccggacgcaactccttatcggaacaggacgcgcctccatatcagccgcgcgttatctcatgcgcgtgaccggacacgaggcgcccgtcccgcttatcgcgcctataaatacagcccgcaacgatctggtaaacacagttgaacagcatctgttacagcgacacaacatgagccggtccaacaacgccaacgcgcccacgccatccaaccgccgccgcaacctgtctctggtgatggtgcgctcctccaagaacgtcatcaaggagttcatgcgcttcaaggtgcgcatggagggcaccgtgaacggccacgagttcgagatcgagggcgagggcgagggccgcccctacgagggccacaacaccgtgaagctgaaggtgaccaagggcggccccctgcccttcgcctgggacatcctgtccccccagttccagtacggctccaaggtgtacgtgaagcaccccgccgacatccccgactacaagaagctgtccttccccgagggcttcaagtgggagcgcgtgatgaacttcgaggacggcggcgtggtgaccgtgacccaggactcctccctgcaggacggctgcttcatctacaaggtgaagttcatcggcgtgaacttcccctccgacggccccgtaatgcagaagaagaccatgggctgggaggcctccaccgagcgcctgtacccccgcgacggcgtgctgaagggcgagatccacaaggccctgaagctgaaggacggcggccactacctggtggagttcaagtccatctacatggccaagaagcccgtgcagctgcccggctactactacgtggactccaagctggacatcacctcccacaacgaggactacaccatcgtggagcagtacgagcgcaccgagggccgccaccacctgttcctgtaggactctagatcataatcagccataccacatttgtagaggttttacttgctttaaaaaacctcccacacctccccctgaacctgaaacataaaatgaatgcaattgttgttgttaacttgtttattgcagcttataatggttacaaataaagcaatagcatcacaaatttcacaaataaagcatttttttcactgcattctagttgtggtttgtccaaactcatcaatgtatcttaaagcttctaggccggccgatctcggatctgacaatgttcagtgcagagactcggctacgcctcgtggactttgaagttgaccaacaatgtttattcttacctctaatagtcctctgtggcaaggtcaagattctgttagaagccaatgaagaacctggttgttcaataacattttgttcgtctaatatttcactaccgcttgacgttggctgcacttcatgtacctcatctataaacgcttcttctgtatcgctctggacgtcatcttcacttacgtgatctgatatttcactgtcagaatcctcaccaacaagctcgtcatcgctttgcagaagagcagagaggatatgctcatcgtctaaagaactacccattttattatatattagtcacgatatctataacaagaaaatatatatataataagttatcacgtaagtagaacatgaaataacaatataattatcgtatgagttaaatcttaaaagtcacgtaaaagataatcatgcgtcattttgactcacgcggtcgttatagttcaaaatcagtgacacttaccgcattgacaagcacgcctcacgggagctccaagcggcgactgagatgtcctaaatgcacagcgacggattcgcgctatttagaaagagagagcaatatttcaagaatgcatgcgtcaattttacgcagactatctttctagggttaaaaaagatttgcgctttactcgacctaaactttaaacacgtcatagaatcttcgtttgacaaaaaccacattgtggccaagctgtgtgacgcgacgcgcgctaaagaatggcaaaccaagtcgcgcgagcgtcgactctagaggatccccgggtaccgagctcgaattcgtaatcatggtcatagctgtttcctgtgtgaaattgttatccgctcacaattccacacaacatacgagccggaagcataaagtgtaaagcctggggtgcctaatgagtgagctaactcacattaattgcgttgcgctcactgcccgctttccagtcgggaaacctgtcgtgccagctgcattaatgaatcggccaacgcgcggggagaggcggtttgcgtattgggcgctcttccgcttcctcgctcactgactcgctgcgctcggtcgttcggctgcggcgagcggtatcagctcactcaaaggcggtaatacggt

SEQ ID NO: 28 - DNA, 15552 bp, Artificial Sequence
  pBac-Aedes-Vasa(AAEL004978)-Cas9-2a-eGFP-p10-UTR-Opie2-dsRed
tatccacagaatcaggggataacgcaggaaagaacatgtgagcaaaaggccagcaaaaggccaggaaccgtaaaaaggccgcgttgctggcgtttttccataggctccgcccccctgacgagcatcacaaaaatcgacgctcaagtcagaggtggcgaaacccgacaggactataaagataccaggcgtttccccctggaagctccctcgtgcgctctcctgttccgaccctgccgcttaccggatacctgtccgcctttctcccttcgggaagcgtggcgctttctcaatgctcacgctgtaggtatctcagttcggtgtaggtcgttcgctccaagctgggctgtgtgcacgaaccccccgttcagcccgaccgctgcgccttatccggtaactatcgtcttgagtccaacccggtaagacacgacttatcgccactggcagcagccactggtaacaggattagcagagcgaggtatgtaggcggtgctacagagttcttgaagtggtggcctaactacggctacactagaaggacagtatttggtatctgcgctctgctgaagccagttaccttcggaaaaagagttggtagctcttgatccggcaaacaaaccaccgctggtagcggtggtttttttgtttgcaagcagcagattacgcgcagaaaaaaaggatctcaagaagatcctttgatcttttctacggggtctgacgctcagtggaacgaaaactcacgttaagggattttggtcatgagattatcaaaaaggatcttcacctagatccttttaaattaaaaatgaagttttaaatcaatctaaagtatatatgagtaaacttggtctgacagttaccaatgcttaatcagtgaggcacctatctcagcgatctgtctatttcgttcatccatagttgcctgactccccgtcgtgtagataactacgatacgggagggcttaccatctggccccagtgctgcaatgataccgcgagacccacgctcaccggctccagatttatcagcaataaaccagccagccggaagggccgagcgcagaagtggtcctgcaactttatccgcctccatccagtctattaattgttgccgggaagctagagtaagtagttcgccagttaatagtttgcgcaacgttgttgccattgctacaggcatcgtggtgtcacgctcgtcgtttggtatggcttcattcagctccggttcccaacgatcaaggcgagttacatgatcccccatgttgtgcaaaaaagcggttagctccttcggtcctccgatcgttgtcagaagtaagttggccgcagtgttatcactcatggttatggcagcactgcataattctcttactgtcatgccatccgtaagatgcttttctgtgactggtgagtactcaaccaagtcattctgagaatagtgtatgcggcgaccgagttgctcttgcccggcgtcaatacgggataataccgcgccacatagcagaactttaaaagtgctcatcattggaaaacgttcttcggggcgaaaactctcaaggatcttaccgctgttgagatccagttcgatgtaacccactcgtgcacccaactgatcttcagcatcttttactttcaccagcgtttctgggtgagcaaaaacaggaaggcaaaatgccgcaaaaaagggaataagggcgacacggaaatgttgaatactcatactcttcctttttcaatattattgaagcatttatcagggttattgtctcatgagcggatacatatttgaatgtatttagaaaaataaacaaataggggttccgcgcacatttccccgaaaagtgccacctgacgtctaagaaaccattattatcatgacattaacctataaaaataggcgtatcacgaggccctttcgtctcgcgcgtttcggtgatgacggtgaaaacctctgacacatgcagctcccggagacggtcacagcttgtctgtaagcggatgccgggagcagacaagcccgtcagggcgcgtcagcgggtgttggcgggtgtcggggctggcttaactatgcggcatcagagcagattgtactgagagtgcaccatatgcggtgtgaaataccgcacagatgcgtaaggagaaaataccgcatcaggcgccattcgccattcaggctgcgcaactgttgggaagggcgatcggtgcgggcctcttcgctattacgccagctggcgaaagggggatgtgctgcaaggcgattaagttgggtaacgccagggttttcccagtcacgacgttgtaaaacgacggccagtgccaagctttgtttaaaatataacaaaattgtgatcccacaaaatgaagtggggcaaaatcaaataattaactagtgtccgtaaacttgttggtcttcaactttttgaggaacacgttggacggcaaatcgtgactataacacaagttgatttaataattttagccaacacgtcgggctgcgtgttttttgcgctctgtgtacacgttgattaactggtcgattaaataatttaatttttggttcttctttaaatctgtgatgaaattttttaaaataactttaaattcttcattggtaaaaaatgccacgttttgcaacttgtgagggtctaatatgaggtcaaactcagtaggagttttatccaaaaaagaaaacatgattacgtctgtacacgaacgcgtattaacgcagagtgcaaagtataagagggttaaaaaatatattttacgcaccatatacgcatcgggttgatatcgttaatatggatcaatttgaacagttgattaacgtgtctctgctcaagtctttgatcaaaacgcaaatcgacgaaaatgtgtcggacaatatcaagtcgatgagcgaaaaactaaaaaggctagaatacgacaatctcacagacagcgttgagatatacggtattcacgacagcaggctgaataataaaaaaattagaaactattatttaaccctagaaagataatcatattgtgacgtacgttaaagataatcatgcgtaaaattgacgcatgtgttttatcggtctgtatatcgaggtttatttattaatttgaatagatattaagttttattatatttacacttacatactaataataaattcaacaaacaatttatttatgtttatttatttattaaaaaaaaacaaaaactcaaaatttcttctataaagtaacaaaacttttaaacattctctcttttacaaaaataaacttattttgtactttaaaaacagtcatgttgtattataaaataagtaattagcttaacttatacataatagaaacaaattatacttattagtcagtcagaaacaactttggcacatatcaatattatgctctcgacaaataacttttttgcattttttgcacgatgcatttgcctttcgccttattttagaggggcagtaagtacagtaagtacgttttttcattactggctcttcagtactgtcatctgatgtaccaggcacttcatttggcaaaatattagagatattatcgcgcaaatatctcttcaaagtaggagcttctaaacgcttacgcataaacgatgacgtcaggctcatgtaaaggtttctcataaattttttgcgactttgaaccttttctcccttgctactgacattatggctgtatataataaaagaatttatgcaggcaatgtttatcattccgtacaataatgccataggccacctattcgtcttcctactgcaggtcatcacagaacacatttggtctagcgtgtccactccgcctttagtttgattataatacataaccatttgcggtttaccggtactttcgttgatagaagcatcctcatcacaagatgataataagtataccatcttagctggcttcggtttatatgagacgagagtaaggggtccgtcaaaacaaaacatcgatgttcccactggcctggagcgactgtttttcagtacttccggtatctcgcgtttgtttgatcgcacggttcccacaatggttaattcgagctcgcccggggtcctaggtcgacgatgtaggtcacggtctcgaagccgcggtgcgggtgccagggcgtgcccttgggctccccgggcgcgtactccacctcacccatctggtccatcatgatgaacgggtcgaggtggcggtagttgatcccggcgaacgcgcggcgcaccgggaagccctcgccctcgaaaccgctgggcgcggtggtcacggtgagcacgggacgtgcgacggcgtcggcgggtgcggatacgcggggcagcgtcagcgggttctcgacggtcacggcgggcatgtcgactcgagcagagttggccgcagatatttgtaaaaaaaataattcattgattcattcagaaatgccatggaggattgctccatttgttaatggttaaaaaagtttcttattacaattcttacaattagtttcttatagatattctcaatcgttcttcacacgagttcaagatttctactgattttttgaatcgtgggtaggacaatcctatgactgtcctacccaggtctttttgtgcgtagtacatgtcctacctgtcctacccacttcccgcgccactgtcttcatggatgatcctagcttgtttgtgccatcggcgtcgctctgtttgcttagaattgggataggctgggaatctgtggaaggacactgttttcggtatgcattttaaaatatatttacacatttagatttacatttttttccaaaactatcatcacctatcatggtttaagacaatttccaaatttactctccgatagatgcttctttttctcctctgggtgacaagactgctgtctccggtaggtgaaacttgctttgacgacctccaacaaacgtcaaattttgaatcccacccaccatcaagcagcacccacaagccgccattcccgctcgcagataagtggatatgaagaaaaatagcacattttacgatgttgttctgaatgttcattcttcttagttttattgcatgtttgataccatgatcgacggaactcatgaaaaatgaaagtattttgagacactgacgcaataataacaaagatatcatataacaaatcaagctgtccgaaactgagggacaggaggtgcttaacgaaaattgtaatttgttcatatttagttcaatagggtcctaaagccctgttccaattttagtgccaaacgcttaagtttaggccaaaaacacatatttattcaattttctaatgttttccgttggtttaagcccaaaaaacatttttttagattttgtcacatcctttggcttaaactcatattttgggtgtattttgttttccgtgtcccttacgaaatgtcagataggaacaaccccagtggtcgaactaaaacccctgtggtgtttttgtcgactaagcgaacgtcaaacatgatcaaaagtgtcaaggttcatttatggaccaaatttttaaattaaagtttaaacatgatatagccattatttgagcgggaaaaattgctaaagtagtaacagtaatatgctttttcgtgttattaaataaaaacaagttttcattaaaaattttaggacccaattatggtacaaaatacattcatcctatcaaattaggattatgttcgatcatgcttgcgtgattcaaagtttttttcatattcaaaataattactaaataggctcaaaattaagaaaatagtcagtttttttaatgattttcaaacttttctacttttttaaaaaggcatgcatatttcaaggatgtgttattcttcgcgaacatgattctacacaatagctttcttttctactaatacaccatcttgattggaccatgatttcttaatttttcgactttgtccggtatttggatgttcgaaaagtaaatgctcaaatgctcagttttatcataccaacttgagtaaatgctcaagaaaatgatttgacaggtggatttgagtaaagtaaaagcttttgctcagtttattcatacgacctattgggtgctgtccggcactgggggatctccccctaacgtgttgtaacggttgcatggatgaaccgattaaattaaattaatttcagataaaataaacacttagtctatgtacaaaccgttgaagcaagtgcagaataatcctatctttccaaatggcatgcgaattgagttggtctttcgattaaaactgggaagtttgcaggaaaatggcccagggggtccaaaatatataggggtccaaaatataatggttaccctattacctctatttacaataggggtttctgcgctcgtgtacatacacgttacatgtcaccaacactacttcaagaatgctggttgaaaatataaacaaagatcagctgttcccagcaaaatcaaacggcagtaaatattttcaaccagcaaatatgcgcacgtgttcgtaaagccccaaacgcaatgacagcggaacggcaacggaaagcggaaccggttcgccagaattaatcacaccatctcgactgagctgtcaacgaatgaaagtgaaccaacactgagtcgacgactacgttatagctgatactggtgaaccggttccgctttccgttgccgttccgctatcattgcgtttgggccttaacaccgctcggtgagagctcaattcagatttgagaattccgtttttgtgcaaaccgtgcaaacaccaaaatggccagatcaatgctttcaccttttgtcttatttataatttctccaaaactcaaccatcaccatcgggcaacacttctccgtactgcgcagtggggagagtgttatctctccacagcagcagagaaaacaaaagaaaaagttccgaggatcgtcgtttgtgaggttcgattgaaggacactagtcgtctccttcatccgcttgcattctaatgcaattacagacctgacgtcatgtttgatgtcgcctaagaacgccggaagaatgaaagagacgataagtttccttcgactgcacctctagacaggagcacattgggtcgtttggttttttgccgtcggtttccgcgtgttttctcattcgttaatgtcctctgaaagaaactgcaagtgcgtcgcgtttcctcgccgtaaagtagctagcatggactataaggaccacgacggagactacaaggatcatgatattgattacaaagacgatgacgataagatggccccaaagaagaagcggaaggtcggtatccacggagtcccagcagccgacaagaagtacagcatcggcctggacatcggcaccaactctgtgggctgggccgtgatcaccgacgagtacaaggtgcccagcaagaaattcaaggtgctgggcaacaccgaccggcacagcatcaagaagaacctgatcggagccctgctgttcgacagcggcgaaacagccgaggccacccggctgaagagaaccgccagaagaagatacaccagacggaagaaccggatctgctatctgcaagagatcttcagcaacgagatggccaaggtggacgacagcttcttccacagactggaagagtccttcctggtggaagaggataagaagcacgagcggcaccccatcttcggcaacatcgtggacgaggtggcctaccacgagaagtaccccaccatctaccacctgagaaagaaactggtggacagcaccgacaaggccgacctgcggctgatctatctggccctggcccacatgatcaagttccggggccacttcctgatcgagggcgacctgaaccccgacaacagcgacgtggacaagctgttcatccagctggtgcagacctacaaccagctgttcgaggaaaaccccatcaacgccagcggcgtggacgccaaggccatcctgtctgccagactgagcaagagcagacggctggaaaatctgatcgcccagctgcccggcgagaagaagaatggcctgttcggaaacctgattgccctgagcctgggcctgacccccaacttcaagagcaacttcgacctggccgaggatgccaaactgcagctgagcaaggacacctacgacgacgacctggacaacctgctggcccagatcggcgaccagtacgccgacctgtttctggccgccaagaacctgtccgacgccatcctgctgagcgacatcctgagagtgaacaccgagatcaccaaggcccccctgagcgcctctatgatcaagagatacgacgagcaccaccaggacctgaccctgctgaaagctctcgtgcggcagcagctgcctgagaagtacaaagagattttcttcgaccagagcaagaacggctacgccggctacattgacggcggagccagccaggaagagttctacaagttcatcaagcccatcctggaaaagatggacggcaccgaggaactgctcgtgaagctgaacagagaggacctgctgcggaagcagcggaccttcgacaacggcagcatcccccaccagatccacctgggagagctgcacgccattctgcggcggcaggaagatttttacccattcctgaaggacaaccgggaaaagatcgagaagatcctgaccttccgcatcccctactacgtgggccctctggccaggggaaacagcagattcgcctggatgaccagaaagagcgaggaaaccatcaccccctggaacttcgaggaagtggtggacaagggcgcttccgcccagagcttcatcgagcggatgaccaacttcgataagaacctgcccaacgagaaggtgctgcccaagcacagcctgctgtacgagtacttcaccgtgtataacgagctgaccaaagtgaaatacgtgaccgagggaatgagaaagcccgccttcctgagcggcgagcagaaaaaggccatcgtggacctgctgttcaagaccaaccggaaagtgaccgtgaagcagctgaaagaggactacttcaagaaaatcgagtgcttcgactccgtggaaatctccggcgtggaagatcggttcaacgcctccctgggcacataccacgatctgctgaaaattatcaaggacaaggacttcctggacaatgaggaaaacgaggacattctggaagatatcgtgctgaccctgacactgtttgaggacagagagatgatcgaggaacggctgaaaacctatgcccacctgttcgacgacaaagtgatgaagcagctgaagcggcggagatacaccggctggggcaggctgagccggaagctgatcaacggcatccgggacaagcagtccggcaagacaatcctggatttcctgaagtccgacggcttcgccaacagaaacttcatgcagctgatccacgacgacagcctgacctttaaagaggacatccagaaagcccaggtgtccggccagggcgatagcctgcacgagcacattgccaatctggccggcagccccgccattaagaagggcatcctgcagacagtgaaggtggtggacgagctcgtgaaagtgatgggccggcacaagcccgagaacatcgtgatcgaaatggccagagagaaccagaccacccagaagggacagaagaacagccgcgagagaatgaagcggatcgaagagggcatcaaagagctgggcagccagatcctgaaagaacaccccgtggaaaacacccagctgcagaacgagaagctgtacctgtactacctgcagaatgggcgggatatgtacgtggaccaggaactggacatcaaccggctgtccgactacgatgtggaccatatcgtgcctcagagctttctgaaggacgactccatcgacaacaaggtgctgaccagaagcgacaagaaccggggcaagagcgacaacgtgccctccgaagaggtcgtgaagaagatgaagaactactggcggcagctgctgaacgccaagctgattacccagagaaagttcgacaatctgaccaaggccgagagaggcggcctgagcgaactggataaggccggcttcatcaagagacagctggtggaaacccggcagatcacaaagcacgtggcacagatcctggactcccggatgaacactaagtacgacgagaatgacaagctgatccgggaagtgaaagtgatcaccctgaagtccaagctggtgtccgatttccggaaggatttccagttttacaaagtgcgcgagatcaacaactaccaccacgcccacgacgcctacctgaacgccgtcgtgggaaccgccctgatcaaaaagtaccctaagctggaaagcgagttcgtgtacggcgactacaaggtgtacgacgtgcggaagatgatcgccaagagcgagcaggaaatcggcaaggctaccgccaagtacttcttctacagcaacatcatgaactttttcaagaccgagattaccctggccaacggcgagatccggaagcggcctctgatcgagacaaacggcgaaaccggggagatcgtgtgggataagggccgggattttgccaccgtgcggaaagtgctgagcatgccccaagtgaatatcgtgaaaaagaccgaggtgcagacaggcggcttcagcaaagagtctatcctgcccaagaggaacagcgataagctgatcgccagaaagaaggactgggaccctaagaagtacggcggcttcgacagccccaccgtggcctattctgtgctggtggtggccaaagtggaaaagggcaagtccaagaaactgaagagtgtgaaagagctgctggggatcaccatcatggaaagaagcagcttcgagaagaatcccatcgactttctggaagccaagggctacaaagaagtgaaaaaggacctgatcatcaagctgcctaagtactccctgttcgagctggaaaacggccggaagagaatgctggcctctgccggcgaactgcagaagggaaacgaactggccctgccctccaaatatgtgaacttcctgtacctggccagccactatgagaagctgaagggctcccccgaggataatgagcagaaacagctgtttgtggaacagcacaagcactacctggacgagatcatcgagcagatcagcgagttctccaagagagtgatcctggccgacgctaatctggacaaagtgctgtccgcctacaacaagcaccgggataagcccatcagagagcaggccgagaatatcatccacctgtttaccctgaccaatctgggagcccctgccgccttcaagtactttgacaccaccatcgaccggaagaggtacaccagcaccaaagaggtgctggacgccaccctgatccaccagagcatcaccggcctgtacgagacacggatcgacctgtctcagctgggaggcgacaaaaggccggcggccacgaaaaaggccggccaggcaaaaaagaaaaaggagggcagaggaagtcttctaacatgcggtgacgtggaggagaatcccggccctatggtgagcaagggcgaggagctgttcaccggggtggtgcccatcctggtcgagctggacggcgacgtaaacggccacaagttcagcgtgtccggcgagggcgagggcgatgccacctacggcaagctgaccctgaagttcatctgcaccaccagcaagctgcccgtgccctggcccaccctcgtgaccaccctgacctacggcgtgcagtgcttcagccgctaccccgaccacatgaagcagcacgacttcttcaagtccgccatgcccgaaggctacgtccaggagcgcaccatcttcttcaaggacgacggcaactacaagacccgcgccgaggtgaagttcgagggcgacaccctggtgaaccgcatcgagctgaagggcatcgacttcaaggaggacggcaacatcctggggcacaagctggagtacaactacaacagccacaacgtctatatcatggccgacaagcagaagaacggcatcaaggtgaacttcaagatccgccacaacatcgaggacggcagcgtgcagctcgccgaccactaccagcagaacacccccatcggcgacggccccgtgctgctgcccgacaaccactacctgagcacccagtccgccctgagcaaagaccccaacgagaagcgcgatcacatggtcctgctggagttcgtgaccgccgccgggatcactctcggcatggacgagctgtacaagtaattaattaactagaatgaatcgtttttaaaataacaaatcaattgttttataatattcgtacgattctttgattatgtaataaaatgtgatcattaggaagattacgaaaaatataaaaaatatgagttctgtgtgtataacaaatgctgtaaacgccacaattgtgtttgttgcaaataaacccatgattatttgattaaaattgttgttttctttgttcatagacaatagtgtgttttgcctaaacgtgtactgcataaactccatgcgagtgtatagcgagctagtggctaacgcttgccccaccaaagtagattcgtcaaaatcctcaatttcatcaccctcctccaagtttaacatttggccgtcggaattaacttctaaagatgccacataatctaataaatgaaatagagattcaaacgtggcgtcatcgtccgtttcgaccatttccgaaaagaactcgggcataaactctatgatttctctggacgtggtgttgtcgaaactctcaaagtacgcagtcaggaacgtgcgcgacatgtcgtcgggaaactcgcgcggaaacatgttgttgtaaccgaacgggtcccatagcgccaaaaccaaatctgccagcgtcaatagaatgagcacgatgccgacaatggagctggcttggatagcgattcgagttaacggccggggcgcgcccatactcggtggcctccccaccaccaacttttttgcactgcaaaaaaacacgcttttgcacgcgggcccatacatagtacaaactctacgtttcgtagactattttacataaatagtctacaccgttgtatacgctccaaatacactaccacacattgaacctttttgcagtgcaaaaaagtacgtgtcggcagtcacgtaggccggccttatcgggtcgcgtcctgtcacgtacgaatcacattatcggaccggacgagtgttgtcttatcgtgacaggacgccagcttcctgtgttgctaaccgcagccggacgcaactccttatcggaacaggacgcgcctccatatcagccgcgcgttatctcatgcgcgtgaccggacacgaggcgcccgtcccgcttatcgcgcctataaatacagcccgcaacgatctggtaaacacagttgaacagcatctgttacagcgacacaacatgagccggtccaacaacgccaacgcgcccacgccatccaaccgccgccgcaacctgtctctggtgatggtgcgctcctccaagaacgtcatcaaggagttcatgcgcttcaaggtgcgcatggagggcaccgtgaacggccacgagttcgagatcgagggcgagggcgagggccgcccctacgagggccacaacaccgtgaagctgaaggtgaccaagggcggccccctgcccttcgcctgggacatcctgtccccccagttccagtacggctccaaggtgtacgtgaagcaccccgccgacatccccgactacaagaagctgtccttccccgagggcttcaagtgggagcgcgtgatgaacttcgaggacggcggcgtggtgaccgtgacccaggactcctccctgcaggacggctgcttcatctacaaggtgaagttcatcggcgtgaacttcccctccgacggccccgtaatgcagaagaagaccatgggctgggaggcctccaccgagcgcctgtacccccgcgacggcgtgctgaagggcgagatccacaaggccctgaagctgaaggacggcggccactacctggtggagttcaagtccatctacatggccaagaagcccgtgcagctgcccggctactactacgtggactccaagctggacatcacctcccacaacgaggactacaccatcgtggagcagtacgagcgcaccgagggccgccaccacctgttcctgtaggactctagatcataatcagccataccacatttgtagaggttttacttgctttaaaaaacctcccacacctccccctgaacctgaaacataaaatgaatgcaattgttgttgttaacttgtttattgcagcttataatggttacaaataaagcaatagcatcacaaatttcacaaataaagcatttttttcactgcattctagttgtggtttgtccaaactcatcaatgtatcttaaagcttctaggccggccgatctcggatctgacaatgttcagtgcagagactcggctacgcctcgtggactttgaagttgaccaacaatgtttattcttacctctaatagtcctctgtggcaaggtcaagattctgttagaagccaatgaagaacctggttgttcaataacattttgttcgtctaatatttcactaccgcttgacgttggctgcacttcatgtacctcatctataaacgcttcttctgtatcgctctggacgtcatcttcacttacgtgatctgatatttcactgtcagaatcctcaccaacaagctcgtcatcgctttgcagaagagcagagaggatatgctcatcgtctaaagaactacccattttattatatattagtcacgatatctataacaagaaaatatatatataataagttatcacgtaagtagaacatgaaataacaatataattatcgtatgagttaaatcttaaaagtcacgtaaaagataatcatgcgtcattttgactcacgcggtcgttatagttcaaaatcagtgacacttaccgcattgacaagcacgcctcacgggagctccaagcggcgactgagatgtcctaaatgcacagcgacggattcgcgctatttagaaagagagagcaatatttcaagaatgcatgcgtcaattttacgcagactatctttctagggttaaaaaagatttgcgctttactcgacctaaactttaaacacgtcatagaatcttcgtttgacaaaaaccacattgtggccaagctgtgtgacgcgacgcgcgctaaagaatggcaaaccaagtcgcgcgagcgtcgactctagaggatccccgggtaccgagctcgaattcgtaatcatggtcatagctgtttcctgtgtgaaattgttatccgctcacaattccacacaacatacgagccggaagcataaagtgtaaagcctggggtgcctaatgagtgagctaactcacattaattgcgttgcgctcactgcccgctttccagtcgggaaacctgtcgtgccagctgcattaatgaatcggccaacgcgcggggagaggcggtttgcgtattgggcgctcttccgcttcctcgctcactgactcgctgcgctcggtcgttcggctgcggcgagcggtatcagctcactcaaaggcggtaatacggt

SEQ ID NO: 29 - DNA, 10398 bp, Artificial Sequence
  pBac-U6(AAEL017774)-sgBTub1-LongScaffold-3_UTR-U6(AAEL017763)-sgB Tub2-LongScaffold-3_UTR-3xp3-tdTomato-v3
tatccacagaatcaggggataacgcaggaaagaacatgtgagcaaaaggccagcaaaaggccaggaaccgtaaaaaggccgcgttgctggcgtttttccataggctccgcccccctgacgagcatcacaaaaatcgacgctcaagtcagaggtggcgaaacccgacaggactataaagataccaggcgtttccccctggaagctccctcgtgcgctctcctgttccgaccctgccgcttaccggatacctgtccgcctttctcccttcgggaagcgtggcgctttctcaatgctcacgctgtaggtatctcagttcggtgtaggtcgttcgctccaagctgggctgtgtgcacgaaccccccgttcagcccgaccgctgcgccttatccggtaactatcgtcttgagtccaacccggtaagacacgacttatcgccactggcagcagccactggtaacaggattagcagagcgaggtatgtaggcggtgctacagagttcttgaagtggtggcctaactacggctacactagaaggacagtatttggtatctgcgctctgctgaagccagttaccttcggaaaaagagttggtagctcttgatccggcaaacaaaccaccgctggtagcggtggtttttttgtttgcaagcagcagattacgcgcagaaaaaaaggatctcaagaagatcctttgatcttttctacggggtctgacgctcagtggaacgaaaactcacgttaagggattttggtcatgagattatcaaaaaggatcttcacctagatccttttaaattaaaaatgaagttttaaatcaatctaaagtatatatgagtaaacttggtctgacagttaccaatgcttaatcagtgaggcacctatctcagcgatctgtctatttcgttcatccatagttgcctgactccccgtcgtgtagataactacgatacgggagggcttaccatctggccccagtgctgcaatgataccgcgagacccacgctcaccggctccagatttatcagcaataaaccagccagccggaagggccgagcgcagaagtggtcctgcaactttatccgcctccatccagtctattaattgttgccgggaagctagagtaagtagttcgccagttaatagtttgcgcaacgttgttgccattgctacaggcatcgtggtgtcacgctcgtcgtttggtatggcttcattcagctccggttcccaacgatcaaggcgagttacatgatcccccatgttgtgcaaaaaagcggttagctccttcggtcctccgatcgttgtcagaagtaagttggccgcagtgttatcactcatggttatggcagcactgcataattctcttactgtcatgccatccgtaagatgcttttctgtgactggtgagtactcaaccaagtcattctgagaatagtgtatgcggcgaccgagttgctcttgcccggcgtcaatacgggataataccgcgccacatagcagaactttaaaagtgctcatcattggaaaacgttcttcggggcgaaaactctcaaggatcttaccgctgttgagatccagttcgatgtaacccactcgtgcacccaactgatcttcagcatcttttactttcaccagcgtttctgggtgagcaaaaacaggaaggcaaaatgccgcaaaaaagggaataagggcgacacggaaatgttgaatactcatactcttcctttttcaatattattgaagcatttatcagggttattgtctcatgagcggatacatatttgaatgtatttagaaaaataaacaaataggggttccgcgcacatttccccgaaaagtgccacctgacgtctaagaaaccattattatcatgacattaacctataaaaataggcgtatcacgaggccctttcgtctcgcgcgtttcggtgatgacggtgaaaacctctgacacatgcagctcccggagacggtcacagcttgtctgtaagcggatgccgggagcagacaagcccgtcagggcgcgtcagcgggtgttggcgggtgtcggggctggcttaactatgcggcatcagagcagattgtactgagagtgcaccatatgcggtgtgaaataccgcacagatgcgtaaggagaaaataccgcatcaggcgccattcgccattcaggctgcgcaactgttgggaagggcgatcggtgcgggcctcttcgctattacgccagctggcgaaagggggatgtgctgcaaggcgattaagttgggtaacgccagggttttcccagtcacgacgttgtaaaacgacggccagtgccaagctttgtttaaaatataacaaaattgtgatcccacaaaatgaagtggggcaaaatcaaataattaactagtgtccgtaaacttgttggtcttcaactttttgaggaacacgttggacggcaaatcgtgactataacacaagttgatttaataattttagccaacacgtcgggctgcgtgttttttgcgctctgtgtacacgttgattaactggtcgattaaataatttaatttttggttcttctttaaatctgtgatgaaattttttaaaataactttaaattcttcattggtaaaaaatgccacgttttgcaacttgtgagggtctaatatgaggtcaaactcagtaggagttttatccaaaaaagaaaacatgattacgtctgtacacgaacgcgtattaacgcagagtgcaaagtataagagggttaaaaaatatattttacgcaccatatacgcatcgggttgatatcgttaatatggatcaatttgaacagttgattaacgtgtctctgctcaagtctttgatcaaaacgcaaatcgacgaaaatgtgtcggacaatatcaagtcgatgagcgaaaaactaaaaaggctagaatacgacaatctcacagacagcgttgagatatacggtattcacgacagcaggctgaataataaaaaaattagaaactattatttaaccctagaaagataatcatattgtgacgtacgttaaagataatcatgcgtaaaattgacgcatgtgttttatcggtctgtatatcgaggtttatttattaatttgaatagatattaagttttattatatttacacttacatactaataataaattcaacaaacaatttatttatgtttatttatttattaaaaaaaaacaaaaactcaaaatttcttctataaagtaacaaaacttttaaacattctctcttttacaaaaataaacttattttgtactttaaaaacagtcatgttgtattataaaataagtaattagcttaacttatacataatagaaacaaattatacttattagtcagtcagaaacaactttggcacatatcaatattatgctctcgacaaataacttttttgcattttttgcacgatgcatttgcctttcgccttattttagaggggcagtaagtacagtaagtacgttttttcattactggctcttcagtactgtcatctgatgtaccaggcacttcatttggcaaaatattagagatattatcgcgcaaatatctcttcaaagtaggagcttctaaacgcttacgcataaacgatgacgtcaggctcatgtaaaggtttctcataaattttttgcgactttgaaccttttctcccttgctactgacattatggctgtatataataaaagaatttatgcaggcaatgtttatcattccgtacaataatgccataggccacctattcgtcttcctactgcaggtcatcacagaacacatttggtctagcgtgtccactccgcctttagtttgattataatacataaccatttgcggtttaccggtactttcgttgatagaagcatcctcatcacaagatgataataagtataccatcttagctggcttcggtttatatgagacgagagtaaggggtccgtcaaaacaaaacatcgatgttcccactggcctggagcgactgtttttcagtacttccggtatctcgcgtttgtttgatcgcacggttcccacaatggttaattcgagctcgcccgggctcctaggagatcttcatcacaaacgaaactattataatcgtcttcaggggaacggtagcatcatatctgtcaccagtcagtcggattcctttctttcggcataaattatgctcgggtgacgagacgagttgaaaatcccgtaaattaaaacatataccacactcgccgtcctagacgacgacgacgacgacgattcccaaggaattgaacccttcatttgcatttcactaccgctctgagagatgcaaagcgcgccagacagtcgatcgaatctgcagaccagagagtcacatcaagaatgttgacattccaccagaagactctaattattcttcgctcgactgggaaaactgttaacaactgctcgagtgtggtcggagcggctcacagtgcgttttcccgtagacaaaaatcaaatttcatggtatttttcggcgataaacagtaagttaaagggaacccgaatttagtgctatataatttaattccactagagtttgtatcctttgatagatacgcgtatttcgacctcaactgcaaggccgtcgtgtactagacttgactaatccagactggtcttttagttatgacttctgtccacatctccatacattcaacgcactgtgcggctgtgctgtgcgactccgtcgagtcgaccaacatagttgaaacaaattgaatatttaattgatcgttataggaatggtgttagatgagtcatcctttacagtaagcacatacagtattataattgaagatcgtcggcagataggtgtgtagggtagagtatcagcaataagttgggacgtttgactttttgtaggtagacaaaaactaaactttttttcgcttctctatgtgtgcccctgggtagcgttccgttccgattggggtgcgaacgaatgaaatcgcccatcgagttgatacgtccatccatcgctagaaccgcgttcgctgtagaagactatataagagcagaggcaagagtagtgaaattactacaacgaggctaccgggtcttagagctatgctggaaacagcatagcaagttaagataaggctagtccgttatcaacttgaaaaagtggcaccgagtcggtgctttttttggtggttgttcatcgattcctaatattgcagtgaagcagtttgttgtgcatggcgaagataaggttagggcgaggaatgccttggaaataagcggcactgggccgtatgaataaaaagcgttgaactttactacatgtagcatctactcaaaaacaaaatccacaaagtttactacacttttggtatgaataaaaaccttttcgaacatgtagtacctactactttaagaaaattctattcaaagtacagagtaatgctgcatgttaagaaaattccattcagagtgactcttgaaatcaataaaatcatgcatatatgccaaatttgtcacttattcacgtgacaaattatgtgaaaatatgaatattactacattcccgctatgcatcgcgtaatcgatcatgaaatttatgttggttatgtaactttacagtattccctttatgtgcatgtgaattttataatgatttgacaacaaggattttccttagaattttcgaattttagctagaaatctgtatcctatgaatgaatcttgagataacagcaattgtaacattataaagttcctaacattttcaagattccagtattgagtcgcgatcgcttaattaaccgcggatatgtcttgccgaagcacattaacccaagccatttatatatcaagtacaagttgatttgattctagtgatggactgacacgaatctatggcactgttgcagagcttacaaacaggtacccggagtcgcttcaattattcaatcatccattcaaaaacttccatctcttccaattagccaatattcaaattggaatccagccagccgacggaggcagatggtctacctggcaactatagagtttccatgtttccagactttccctcccggtaaacggagacaaaacgacagacgtaagtaggtacatatgcataccgcacggacaaatcaaatttgtctggcagctccaattagagtcgttaaaaatttaacgatgcgctaaataacttcaagctatttgtctcgctggattggcttcgagtggtaagatcctatcaaatgccgaaaacaaaaaactttcttcttaattgttcgttcttcaacacctctccatggtgataacggatacggtttcattgtcagcatccatcctccgaaaaatacattacgccttgaaatatgcaatcgcaaacacggatctgtttggaacatttattttactatgaagagatgcgataggtaatatttatttgagcgtttaagatactcattgttctctcaaagaatgtcattgaaagccaacgaggtcaaatcaaatattataataaaaaggtcaaagaggactaacttaaagctctctttatggataggaaaaaatattttcgcccatcgctagaacttttaccgtttccattgagtatataactaagatgaatgaggctaattgatgtctccgcaatacgccccgggtcttagagctatgctggaaacagcatagcaagttaagataaggctagtccgttatcaacttgaaaaagtggcaccgagtcggtgctttttttaagatgcttcggcaattaataataaggaatggtaaagcattcttcaaatgttactatgttctcaaattttcaagaattaggtattcaagaaattctttcaggcatattccataatctgcacaagcagctactttagaaattattgccgggcttaaattatatgtacaacatttcctgagtattttctgacaaaaattctcacaagggaaggtcacgatggagttacacggggtttttaaccggactatttttgttagattctacatgtcgaaatatgaaaaaccccaaagcctttcgggtgatggaccagtggtgtagccaggaggggctctgaaaggggtaattttgtacgtatattatattattaagctaattggaaatttgacaaaaatatttttttagtatttattgtgatggtagagaacaaaattgacattaatgtacgtttgaaatgtatttgccatgcctttggcgtactaacatggagtatggacaccaaaaccgatttcggccttttgggcccggcgcgccaattcgagctcgcccggggatctaattcaattagagactaattcaattagagctaattcaattaggatccaagcttatcgatttcgaaccctcgaccgccggagtataaatagaggcgcttcgtctacggagcgacaattcaattcaaacaagcaaagtgaacacgtcgctaagcgaaagctaagcaaataaacaagcgcagctgaacaagctaaacaatcggggtaccgctagagtcgacggtacgatccaccggtcgccaccatggtgagcaagggcgaggaggtcatcaaagagttcatgcgcttcaaggtgcgcatggagggctccatgaacggccacgagttcgagatcgagggcgagggcgagggccgcccctacgagggcacccagaccgccaagctgaaggtgaccaagggcggccccctgcccttcgcctgggacatcctgtccccccagttcatgtacggctccaaggcgtacgtgaagcaccccgccgacatccccgattacaagaagctgtccttccccgagggcttcaagtgggagcgcgtgatgaacttcgaggacggcggtctggtgaccgtgacccaggactcctccctgcaggacggcacgctgatctacaaggtgaagatgcgcggcaccaacttcccccccgacggccccgtaatgcagaagaagaccatgggctgggaggcctccaccgagcgcctgtacccccgcgacggcgtgctgaagggcgagatccaccaggccctgaagctgaaggacggcggccactacctggtggagttcaagaccatctacatggccaagaagcccgtgcaactgcccggctactactacgtggacaccaagctggacatcacctcccacaacgaggactacaccatcgtggaacagtacgagcgctccgagggccgccaccacctgttcctggggcatggcaccggcagcaccggcagcggcagctccggcaccgcctcctccgaggacaacaacatggccgttatcaaggaatttatgcgcttcaaagttaggatggagggatccatgaacggacatgagttcgagatcgagggagagggcgagggacgcccgtatgaaggcacacaaacagccaaactcaaggtcaccaagggcggaccactgcccttcgcctgggatatcctgagtccccagtttatgtacggcagcaaggcctacgttaagcaccccgctgacataccggactacaaaaagctgtcctttccggaaggcttcaagtgggagcgcgtgatgaatttcgaagacggaggactggtcactgtgacccaagatagcagtttgcaggacggtacactgatctataaggttaaaatgcgcggcactaactttccgccagatggcccagtgatgcagaagaagaccatgggttgggaggcatccaccgaacgtctgtaccctcgagacggagtgctcaagggcgagatccatcaggccctcaaactgaaagatggtggtcactacctggtcgaatttaagaccatttacatggccaagaagccggttcagctgcccggatattattatgtggatacgaaactggatataacttcgcataacgaagactacaccattgtcgagcagtatgagcgcagcgaaggccgacatcacctgttcctctacggcatggacgagctgtacaagtaggcggccgcgactctagatcataatcagccataccacatttgtagaggttttacttgctttaaaaaacctcccacacctccccctgaacctgaaacataaaatgaatgcaattgttgttgttaacttgtttattgcagcttataatggttacaaataaagcaatagcatcacaaatttcacaaataaagcatttttttcactgcattctagttgtggtttgtccaaactcatcaatgtatcttaaagcttctaggccggccgatctcggatctgacaatgttcagtgcagagactcggctacgcctcgtggactttgaagttgaccaacaatgtttattcttacctctaatagtcctctgtggcaaggtcaagattctgttagaagccaatgaagaacctggttgttcaataacattttgttcgtctaatatttcactaccgcttgacgttggctgcacttcatgtacctcatctataaacgcttcttctgtatcgctctggacgtcatcttcacttacgtgatctgatatttcactgtcagaatcctcaccaacaagctcgtcatcgctttgcagaagagcagagaggatatgctcatcgtctaaagaactacccattttattatatattagtcacgatatctataacaagaaaatatatatataataagttatcacgtaagtagaacatgaaataacaatataattatcgtatgagttaaatcttaaaagtcacgtaaaagataatcatgcgtcattttgactcacgcggtcgttatagttcaaaatcagtgacacttaccgcattgacaagcacgcctcacgggagctccaagcggcgactgagatgtcctaaatgcacagcgacggattcgcgctatttagaaagagagagcaatatttcaagaatgcatgcgtcaattttacgcagactatctttctagggttaaaaaagatttgcgctttactcgacctaaactttaaacacgtcatagaatcttcgtttgacaaaaaccacattgtggccaagctgtgtgacgcgacgcgcgctaaagaatggcaaaccaagtcgcgcgagcgtcgactctagaggatccccgggtaccgagctcgaattcgtaatcatggtcatagctgtttcctgtgtgaaattgttatccgctcacaattccacacaacatacgagccggaagcataaagtgtaaagcctggggtgcctaatgagtgagctaactcacattaattgcgttgcgctcactgcccgctttccagtcgggaaacctgtcgtgccagctgcattaatgaatcggccaacgcgcggggagaggcggtttgcgtattgggcgctcttccgcttcctcgctcactgactcgctgcgctcggtcgttcggctgcggcgagcggtatcagctcactcaaaggcggtaatacggt

SEQ ID NO: 30 - DNA, 10398 bp, Artificial Sequence
  pBac-U6(AAEL017774)-sgBTub3-LongScaffold-3_UTR-U6(AAEL017763)-sgB Tub4-LongScaffold-3_UTR-3xp3-tdTomato-v3
tatccacagaatcaggggataacgcaggaaagaacatgtgagcaaaaggccagcaaaaggccaggaaccgtaaaaaggccgcgttgctggcgtttttccataggctccgcccccctgacgagcatcacaaaaatcgacgctcaagtcagaggtggcgaaacccgacaggactataaagataccaggcgtttccccctggaagctccctcgtgcgctctcctgttccgaccctgccgcttaccggatacctgtccgcctttctcccttcgggaagcgtggcgctttctcaatgctcacgctgtaggtatctcagttcggtgtaggtcgttcgctccaagctgggctgtgtgcacgaaccccccgttcagcccgaccgctgcgccttatccggtaactatcgtcttgagtccaacccggtaagacacgacttatcgccactggcagcagccactggtaacaggattagcagagcgaggtatgtaggcggtgctacagagttcttgaagtggtggcctaactacggctacactagaaggacagtatttggtatctgcgctctgctgaagccagttaccttcggaaaaagagttggtagctcttgatccggcaaacaaaccaccgctggtagcggtggtttttttgtttgcaagcagcagattacgcgcagaaaaaaaggatctcaagaagatcctttgatcttttctacggggtctgacgctcagtggaacgaaaactcacgttaagggattttggtcatgagattatcaaaaaggatcttcacctagatccttttaaattaaaaatgaagttttaaatcaatctaaagtatatatgagtaaacttggtctgacagttaccaatgcttaatcagtgaggcacctatctcagcgatctgtctatttcgttcatccatagttgcctgactccccgtcgtgtagataactacgatacgggagggcttaccatctggccccagtgctgcaatgataccgcgagacccacgctcaccggctccagatttatcagcaataaaccagccagccggaagggccgagcgcagaagtggtcctgcaactttatccgcctccatccagtctattaattgttgccgggaagctagagtaagtagttcgccagttaatagtttgcgcaacgttgttgccattgctacaggcatcgtggtgtcacgctcgtcgtttggtatggcttcattcagctccggttcccaacgatcaaggcgagttacatgatcccccatgttgtgcaaaaaagcggttagctccttcggtcctccgatcgttgtcagaagtaagttggccgcagtgttatcactcatggttatggcagcactgcataattctcttactgtcatgccatccgtaagatgcttttctgtgactggtgagtactcaaccaagtcattctgagaatagtgtatgcggcgaccgagttgctcttgcccggcgtcaatacgggataataccgcgccacatagcagaactttaaaagtgctcatcattggaaaacgttcttcggggcgaaaactctcaaggatcttaccgctgttgagatccagttcgatgtaacccactcgtgcacccaactgatcttcagcatcttttactttcaccagcgtttctgggtgagcaaaaacaggaaggcaaaatgccgcaaaaaagggaataagggcgacacggaaatgttgaatactcatactcttcctttttcaatattattgaagcatttatcagggttattgtctcatgagcggatacatatttgaatgtatttagaaaaataaacaaataggggttccgcgcacatttccccgaaaagtgccacctgacgtctaagaaaccattattatcatgacattaacctataaaaataggcgtatcacgaggccctttcgtctcgcgcgtttcggtgatgacggtgaaaacctctgacacatgcagctcccggagacggtcacagcttgtctgtaagcggatgccgggagcagacaagcccgtcagggcgcgtcagcgggtgttggcgggtgtcggggctggcttaactatgcggcatcagagcagattgtactgagagtgcaccatatgcggtgtgaaataccgcacagatgcgtaaggagaaaataccgcatcaggcgccattcgccattcaggctgcgcaactgttgggaagggcgatcggtgcgggcctcttcgctattacgccagctggcgaaagggggatgtgctgcaaggcgattaagttgggtaacgccagggttttcccagtcacgacgttgtaaaacgacggccagtgccaagctttgtttaaaatataacaaaattgtgatcccacaaaatgaagtggggcaaaatcaaataattaactagtgtccgtaaacttgttggtcttcaactttttgaggaacacgttggacggcaaatcgtgactataacacaagttgatttaataattttagccaacacgtcgggctgcgtgttttttgcgctctgtgtacacgttgattaactggtcgattaaataatttaatttttggttcttctttaaatctgtgatgaaattttttaaaataactttaaattcttcattggtaaaaaatgccacgttttgcaacttgtgagggtctaatatgaggtcaaactcagtaggagttttatccaaaaaagaaaacatgattacgtctgtacacgaacgcgtattaacgcagagtgcaaagtataagagggttaaaaaatatattttacgcaccatatacgcatcgggttgatatcgttaatatggatcaatttgaacagttgattaacgtgtctctgctcaagtctttgatcaaaacgcaaatcgacgaaaatgtgtcggacaatatcaagtcgatgagcgaaaaactaaaaaggctagaatacgacaatctcacagacagcgttgagatatacggtattcacgacagcaggctgaataataaaaaaattagaaactattatttaaccctagaaagataatcatattgtgacgtacgttaaagataatcatgcgtaaaattgacgcatgtgttttatcggtctgtatatcgaggtttatttattaatttgaatagatattaagttttattatatttacacttacatactaataataaattcaacaaacaatttatttatgtttatttatttattaaaaaaaaacaaaaactcaaaatttcttctataaagtaacaaaacttttaaacattctctcttttacaaaaataaacttattttgtactttaaaaacagtcatgttgtattataaaataagtaattagcttaacttatacataatagaaacaaattatacttattagtcagtcagaaacaactttggcacatatcaatattatgctctcgacaaataacttttttgcattttttgcacgatgcatttgcctttcgccttattttagaggggcagtaagtacagtaagtacgttttttcattactggctcttcagtactgtcatctgatgtaccaggcacttcatttggcaaaatattagagatattatcgcgcaaatatctcttcaaagtaggagcttctaaacgcttacgcataaacgatgacgtcaggctcatgtaaaggtttctcataaattttttgcgactttgaaccttttctcccttgctactgacattatggctgtatataataaaagaatttatgcaggcaatgtttatcattccgtacaataatgccataggccacctattcgtcttcctactgcaggtcatcacagaacacatttggtctagcgtgtccactccgcctttagtttgattataatacataaccatttgcggtttaccggtactttcgttgatagaagcatcctcatcacaagatgataataagtataccatcttagctggcttcggtttatatgagacgagagtaaggggtccgtcaaaacaaaacatcgatgttcccactggcctggagcgactgtttttcagtacttccggtatctcgcgtttgtttgatcgcacggttcccacaatggttaattcgagctcgcccgggctcctaggagatcttcatcacaaacgaaactattataatcgtcttcaggggaacggtagcatcatatctgtcaccagtcagtcggattcctttctttcggcataaattatgctcgggtgacgagacgagttgaaaatcccgtaaattaaaacatataccacactcgccgtcctagacgacgacgacgacgacgattcccaaggaattgaacccttcatttgcatttcactaccgctctgagagatgcaaagcgcgccagacagtcgatcgaatctgcagaccagagagtcacatcaagaatgttgacattccaccagaagactctaattattcttcgctcgactgggaaaactgttaacaactgctcgagtgtggtcggagcggctcacagtgcgttttcccgtagacaaaaatcaaatttcatggtatttttcggcgataaacagtaagttaaagggaacccgaatttagtgctatataatttaattccactagagtttgtatcctttgatagatacgcgtatttcgacctcaactgcaaggccgtcgtgtactagacttgactaatccagactggtcttttagttatgacttctgtccacatctccatacattcaacgcactgtgcggctgtgctgtgcgactccgtcgagtcgaccaacatagttgaaacaaattgaatatttaattgatcgttataggaatggtgttagatgagtcatcctttacagtaagcacatacagtattataattgaagatcgtcggcagataggtgtgtagggtagagtatcagcaataagttgggacgtttgactttttgtaggtagacaaaaactaaactttttttcgcttctctatgtgtgcccctgggtagcgttccgttccgattggggtgcgaacgaatgaaatcgcccatcgagttgatacgtccatccatcgctagaaccgcgttcgctgtagaagactatataagagcagaggcaagagtagtgaaatgataggagccaagttctggggtcttagagctatgctggaaacagcatagcaagttaagataaggctagtccgttatcaacttgaaaaagtggcaccgagtcggtgctttttttggtggttgttcatcgattcctaatattgcagtgaagcagtttgttgtgcatggcgaagataaggttagggcgaggaatgccttggaaataagcggcactgggccgtatgaataaaaagcgttgaactttactacatgtagcatctactcaaaaacaaaatccacaaagtttactacacttttggtatgaataaaaaccttttcgaacatgtagtacctactactttaagaaaattctattcaaagtacagagtaatgctgcatgttaagaaaattccattcagagtgactcttgaaatcaataaaatcatgcatatatgccaaatttgtcacttattcacgtgacaaattatgtgaaaatatgaatattactacattcccgctatgcatcgcgtaatcgatcatgaaatttatgttggttatgtaactttacagtattccctttatgtgcatgtgaattttataatgatttgacaacaaggattttccttagaattttcgaattttagctagaaatctgtatcctatgaatgaatcttgagataacagcaattgtaacattataaagttcctaacattttcaagattccagtattgagtcgcgatcgcttaattaaccgcggatatgtcttgccgaagcacattaacccaagccatttatatatcaagtacaagttgatttgattctagtgatggactgacacgaatctatggcactgttgcagagcttacaaacaggtacccggagtcgcttcaattattcaatcatccattcaaaaacttccatctcttccaattagccaatattcaaattggaatccagccagccgacggaggcagatggtctacctggcaactatagagtttccatgtttccagactttccctcccggtaaacggagacaaaacgacagacgtaagtaggtacatatgcataccgcacggacaaatcaaatttgtctggcagctccaattagagtcgttaaaaatttaacgatgcgctaaataacttcaagctatttgtctcgctggattggcttcgagtggtaagatcctatcaaatgccgaaaacaaaaaactttcttcttaattgttcgttcttcaacacctctccatggtgataacggatacggtttcattgtcagcatccatcctccgaaaaatacattacgccttgaaatatgcaatcgcaaacacggatctgtttggaacatttattttactatgaagagatgcgataggtaatatttatttgagcgtttaagatactcattgttctctcaaagaatgtcattgaaagccaacgaggtcaaatcaaatattataataaaaaggtcaaagaggactaacttaaagctctctttatggataggaaaaaatattttcgcccatcgctagaacttttaccgtttccattgagtatataactaagatgaatgaggctaattgatcactatggattcggtccgaggtcttagagctatgctggaaacagcatagcaagttaagataaggctagtccgttatcaacttgaaaaagtggcaccgagtcggtgctttttttaagatgcttcggcaattaataataaggaatggtaaagcattcttcaaatgttactatgttctcaaattttcaagaattaggtattcaagaaattctttcaggcatattccataatctgcacaagcagctactttagaaattattgccgggcttaaattatatgtacaacatttcctgagtattttctgacaaaaattctcacaagggaaggtcacgatggagttacacggggtttttaaccggactatttttgttagattctacatgtcgaaatatgaaaaaccccaaagcctttcgggtgatggaccagtggtgtagccaggaggggctctgaaaggggtaattttgtacgtatattatattattaagctaattggaaatttgacaaaaatatttttttagtatttattgtgatggtagagaacaaaattgacattaatgtacgtttgaaatgtatttgccatgcctttggcgtactaacatggagtatggacaccaaaaccgatttcggccttttgggcccggcgcgccaattcgagctcgcccggggatctaattcaattagagactaattcaattagagctaattcaattaggatccaagcttatcgatttcgaaccctcgaccgccggagtataaatagaggcgcttcgtctacggagcgacaattcaattcaaacaagcaaagtgaacacgtcgctaagcgaaagctaagcaaataaacaagcgcagctgaacaagctaaacaatcggggtaccgctagagtcgacggtacgatccaccggtcgccaccatggtgagcaagggcgaggaggtcatcaaagagttcatgcgcttcaaggtgcgcatggagggctccatgaacggccacgagttcgagatcgagggcgagggcgagggccgcccctacgagggcacccagaccgccaagctgaaggtgaccaagggcggccccctgcccttcgcctgggacatcctgtccccccagttcatgtacggctccaaggcgtacgtgaagcaccccgccgacatccccgattacaagaagctgtccttccccgagggcttcaagtgggagcgcgtgatgaacttcgaggacggcggtctggtgaccgtgacccaggactcctccctgcaggacggcacgctgatctacaaggtgaagatgcgcggcaccaacttcccccccgacggccccgtaatgcagaagaagaccatgggctgggaggcctccaccgagcgcctgtacccccgcgacggcgtgctgaagggcgagatccaccaggccctgaagctgaaggacggcggccactacctggtggagttcaagaccatctacatggccaagaagcccgtgcaactgcccggctactactacgtggacaccaagctggacatcacctcccacaacgaggactacaccatcgtggaacagtacgagcgctccgagggccgccaccacctgttcctggggcatggcaccggcagcaccggcagcggcagctccggcaccgcctcctccgaggacaacaacatggccgttatcaaggaatttatgcgcttcaaagttaggatggagggatccatgaacggacatgagttcgagatcgagggagagggcgagggacgcccgtatgaaggcacacaaacagccaaactcaaggtcaccaagggcggaccactgcccttcgcctgggatatcctgagtccccagtttatgtacggcagcaaggcctacgttaagcaccccgctgacataccggactacaaaaagctgtcctttccggaaggcttcaagtgggagcgcgtgatgaatttcgaagacggaggactggtcactgtgacccaagatagcagtttgcaggacggtacactgatctataaggttaaaatgcgcggcactaactttccgccagatggcccagtgatgcagaagaagaccatgggttgggaggcatccaccgaacgtctgtaccctcgagacggagtgctcaagggcgagatccatcaggccctcaaactgaaagatggtggtcactacctggtcgaatttaagaccatttacatggccaagaagccggttcagctgcccggatattattatgtggatacgaaactggatataacttcgcataacgaagactacaccattgtcgagcagtatgagcgcagcgaaggccgacatcacctgttcctctacggcatggacgagctgtacaagtaggcggccgcgactctagatcataatcagccataccacatttgtagaggttttacttgctttaaaaaacctcccacacctccccctgaacctgaaacataaaatgaatgcaattgttgttgttaacttgtttattgcagcttataatggttacaaataaagcaatagcatcacaaatttcacaaataaagcatttttttcactgcattctagttgtggtttgtccaaactcatcaatgtatcttaaagcttctaggccggccgatctcggatctgacaatgttcagtgcagagactcggctacgcctcgtggactttgaagttgaccaacaatgtttattcttacctctaatagtcctctgtggcaaggtcaagattctgttagaagccaatgaagaacctggttgttcaataacattttgttcgtctaatatttcactaccgcttgacgttggctgcacttcatgtacctcatctataaacgcttcttctgtatcgctctggacgtcatcttcacttacgtgatctgatatttcactgtcagaatcctcaccaacaagctcgtcatcgctttgcagaagagcagagaggatatgctcatcgtctaaagaactacccattttattatatattagtcacgatatctataacaagaaaatatatatataataagttatcacgtaagtagaacatgaaataacaatataattatcgtatgagttaaatcttaaaagtcacgtaaaagataatcatgcgtcattttgactcacgcggtcgttatagttcaaaatcagtgacacttaccgcattgacaagcacgcctcacgggagctccaagcggcgactgagatgtcctaaatgcacagcgacggattcgcgctatttagaaagagagagcaatatttcaagaatgcatgcgtcaattttacgcagactatctttctagggttaaaaaagatttgcgctttactcgacctaaactttaaacacgtcatagaatcttcgtttgacaaaaaccacattgtggccaagctgtgtgacgcgacgcgcgctaaagaatggcaaaccaagtcgcgcgagcgtcgactctagaggatccccgggtaccgagctcgaattcgtaatcatggtcatagctgtttcctgtgtgaaattgttatccgctcacaattccacacaacatacgagccggaagcataaagtgtaaagcctggggtgcctaatgagtgagctaactcacattaattgcgttgcgctcactgcccgctttccagtcgggaaacctgtcgtgccagctgcattaatgaatcggccaacgcgcggggagaggcggtttgcgtattgggcgctcttccgcttcctcgctcactgactcgctgcgctcggtcgttcggctgcggcgagcggtatcagctcactcaaaggcggtaatacggt

SEQ ID NO: 31 - DNA, 10398 bp, Artificial Sequence
  pBac-U6(AAEL017774)-sgDsx1-LongScaffold-3_UTR-U6(AAEL017763)-sgDs x2-LongScaffold-3_UTR-3xp3-tdTomato-v3-Revised
tatccacagaatcaggggataacgcaggaaagaacatgtgagcaaaaggccagcaaaaggccaggaaccgtaaaaaggccgcgttgctggcgtttttccataggctccgcccccctgacgagcatcacaaaaatcgacgctcaagtcagaggtggcgaaacccgacaggactataaagataccaggcgtttccccctggaagctccctcgtgcgctctcctgttccgaccctgccgcttaccggatacctgtccgcctttctcccttcgggaagcgtggcgctttctcaatgctcacgctgtaggtatctcagttcggtgtaggtcgttcgctccaagctgggctgtgtgcacgaaccccccgttcagcccgaccgctgcgccttatccggtaactatcgtcttgagtccaacccggtaagacacgacttatcgccactggcagcagccactggtaacaggattagcagagcgaggtatgtaggcggtgctacagagttcttgaagtggtggcctaactacggctacactagaaggacagtatttggtatctgcgctctgctgaagccagttaccttcggaaaaagagttggtagctcttgatccggcaaacaaaccaccgctggtagcggtggtttttttgtttgcaagcagcagattacgcgcagaaaaaaaggatctcaagaagatcctttgatcttttctacggggtctgacgctcagtggaacgaaaactcacgttaagggattttggtcatgagattatcaaaaaggatcttcacctagatccttttaaattaaaaatgaagttttaaatcaatctaaagtatatatgagtaaacttggtctgacagttaccaatgcttaatcagtgaggcacctatctcagcgatctgtctatttcgttcatccatagttgcctgactccccgtcgtgtagataactacgatacgggagggcttaccatctggccccagtgctgcaatgataccgcgagacccacgctcaccggctccagatttatcagcaataaaccagccagccggaagggccgagcgcagaagtggtcctgcaactttatccgcctccatccagtctattaattgttgccgggaagctagagtaagtagttcgccagttaatagtttgcgcaacgttgttgccattgctacaggcatcgtggtgtcacgctcgtcgtttggtatggcttcattcagctccggttcccaacgatcaaggcgagttacatgatcccccatgttgtgcaaaaaagcggttagctccttcggtcctccgatcgttgtcagaagtaagttggccgcagtgttatcactcatggttatggcagcactgcataattctcttactgtcatgccatccgtaagatgcttttctgtgactggtgagtactcaaccaagtcattctgagaatagtgtatgcggcgaccgagttgctcttgcccggcgtcaatacgggataataccgcgccacatagcagaactttaaaagtgctcatcattggaaaacgttcttcggggcgaaaactctcaaggatcttaccgctgttgagatccagttcgatgtaacccactcgtgcacccaactgatcttcagcatcttttactttcaccagcgtttctgggtgagcaaaaacaggaaggcaaaatgccgcaaaaaagggaataagggcgacacggaaatgttgaatactcatactcttcctttttcaatattattgaagcatttatcagggttattgtctcatgagcggatacatatttgaatgtatttagaaaaataaacaaataggggttccgcgcacatttccccgaaaagtgccacctgacgtctaagaaaccattattatcatgacattaacctataaaaataggcgtatcacgaggccctttcgtctcgcgcgtttcggtgatgacggtgaaaacctctgacacatgcagctcccggagacggtcacagcttgtctgtaagcggatgccgggagcagacaagcccgtcagggcgcgtcagcgggtgttggcgggtgtcggggctggcttaactatgcggcatcagagcagattgtactgagagtgcaccatatgcggtgtgaaataccgcacagatgcgtaaggagaaaataccgcatcaggcgccattcgccattcaggctgcgcaactgttgggaagggcgatcggtgcgggcctcttcgctattacgccagctggcgaaagggggatgtgctgcaaggcgattaagttgggtaacgccagggttttcccagtcacgacgttgtaaaacgacggccagtgccaagctttgtttaaaatataacaaaattgtgatcccacaaaatgaagtggggcaaaatcaaataattaactagtgtccgtaaacttgttggtcttcaactttttgaggaacacgttggacggcaaatcgtgactataacacaagttgatttaataattttagccaacacgtcgggctgcgtgttttttgcgctctgtgtacacgttgattaactggtcgattaaataatttaatttttggttcttctttaaatctgtgatgaaattttttaaaataactttaaattcttcattggtaaaaaatgccacgttttgcaacttgtgagggtctaatatgaggtcaaactcagtaggagttttatccaaaaaagaaaacatgattacgtctgtacacgaacgcgtattaacgcagagtgcaaagtataagagggttaaaaaatatattttacgcaccatatacgcatcgggttgatatcgttaatatggatcaatttgaacagttgattaacgtgtctctgctcaagtctttgatcaaaacgcaaatcgacgaaaatgtgtcggacaatatcaagtcgatgagcgaaaaactaaaaaggctagaatacgacaatctcacagacagcgttgagatatacggtattcacgacagcaggctgaataataaaaaaattagaaactattatttaaccctagaaagataatcatattgtgacgtacgttaaagataatcatgcgtaaaattgacgcatgtgttttatcggtctgtatatcgaggtttatttattaatttgaatagatattaagttttattatatttacacttacatactaataataaattcaacaaacaatttatttatgtttatttatttattaaaaaaaaacaaaaactcaaaatttcttctataaagtaacaaaacttttaaacattctctcttttacaaaaataaacttattttgtactttaaaaacagtcatgttgtattataaaataagtaattagcttaacttatacataatagaaacaaattatacttattagtcagtcagaaacaactttggcacatatcaatattatgctctcgacaaataacttttttgcattttttgcacgatgcatttgcctttcgccttattttagaggggcagtaagtacagtaagtacgttttttcattactggctcttcagtactgtcatctgatgtaccaggcacttcatttggcaaaatattagagatattatcgcgcaaatatctcttcaaagtaggagcttctaaacgcttacgcataaacgatgacgtcaggctcatgtaaaggtttctcataaattttttgcgactttgaaccttttctcccttgctactgacattatggctgtatataataaaagaatttatgcaggcaatgtttatcattccgtacaataatgccataggccacctattcgtcttcctactgcaggtcatcacagaacacatttggtctagcgtgtccactccgcctttagtttgattataatacataaccatttgcggtttaccggtactttcgttgatagaagcatcctcatcacaagatgataataagtataccatcttagctggcttcggtttatatgagacgagagtaaggggtccgtcaaaacaaaacatcgatgttcccactggcctggagcgactgtttttcagtacttccggtatctcgcgtttgtttgatcgcacggttcccacaatggttaattcgagctcgcccgggctcctaggagatcttcatcacaaacgaaactattataatcgtcttcaggggaacggtagcatcatatctgtcaccagtcagtcggattcctttctttcggcataaattatgctcgggtgacgagacgagttgaaaatcccgtaaattaaaacatataccacactcgccgtcctagacgacgacgacgacgacgattcccaaggaattgaacccttcatttgcatttcactaccgctctgagagatgcaaagcgcgccagacagtcgatcgaatctgcagaccagagagtcacatcaagaatgttgacattccaccagaagactctaattattcttcgctcgactgggaaaactgttaacaactgctcgagtgtggtcggagcggctcacagtgcgttttcccgtagacaaaaatcaaatttcatggtatttttcggcgataaacagtaagttaaagggaacccgaatttagtgctatataatttaattccactagagtttgtatcctttgatagatacgcgtatttcgacctcaactgcaaggccgtcgtgtactagacttgactaatccagactggtcttttagttatgacttctgtccacatctccatacattcaacgcactgtgcggctgtgctgtgcgactccgtcgagtcgaccaacatagttgaaacaaattgaatatttaattgatcgttataggaatggtgttagatgagtcatcctttacagtaagcacatacagtattataattgaagatcgtcggcagataggtgtgtagggtagagtatcagcaataagttgggacgtttgactttttgtaggtagacaaaaactaaactttttttcgcttctctatgtgtgcccctgggtagcgttccgttccgattggggtgcgaacgaatgaaatcgcccatcgagttgatacgtccatccatcgctagaaccgcgttcgctgtagaagactatataagagcagaggcaagagtagtgaaatagcgacatgcagccattctggtcttagagctatgctggaaacagcatagcaagttaagataaggctagtccgttatcaacttgaaaaagtggcaccgagtcggtgctttttttggtggttgttcatcgattcctaatattgcagtgaagcagtttgttgtgcatggcgaagataaggttagggcgaggaatgccttggaaataagcggcactgggccgtatgaataaaaagcgttgaactttactacatgtagcatctactcaaaaacaaaatccacaaagtttactacacttttggtatgaataaaaaccttttcgaacatgtagtacctactactttaagaaaattctattcaaagtacagagtaatgctgcatgttaagaaaattccattcagagtgactcttgaaatcaataaaatcatgcatatatgccaaatttgtcacttattcacgtgacaaattatgtgaaaatatgaatattactacattcccgctatgcatcgcgtaatcgatcatgaaatttatgttggttatgtaactttacagtattccctttatgtgcatgtgaattttataatgatttgacaacaaggattttccttagaattttcgaattttagctagaaatctgtatcctatgaatgaatcttgagataacagcaattgtaacattataaagttcctaacattttcaagattccagtattgagtcgcgatcgcttaattaaccgcggatatgtcttgccgaagcacattaacccaagccatttatatatcaagtacaagttgatttgattctagtgatggactgacacgaatctatggcactgttgcagagcttacaaacaggtacccggagtcgcttcaattattcaatcatccattcaaaaacttccatctcttccaattagccaatattcaaattggaatccagccagccgacggaggcagatggtctacctggcaactatagagtttccatgtttccagactttccctcccggtaaacggagacaaaacgacagacgtaagtaggtacatatgcataccgcacggacaaatcaaatttgtctggcagctccaattagagtcgttaaaaatttaacgatgcgctaaataacttcaagctatttgtctcgctggattggcttcgagtggtaagatcctatcaaatgccgaaaacaaaaaactttcttcttaattgttcgttcttcaacacctctccatggtgataacggatacggtttcattgtcagcatccatcctccgaaaaatacattacgccttgaaatatgcaatcgcaaacacggatctgtttggaacatttattttactatgaagagatgcgataggtaatatttatttgagcgtttaagatactcattgttctctcaaagaatgtcattgaaagccaacgaggtcaaatcaaatattataataaaaaggtcaaagaggactaacttaaagctctctttatggataggaaaaaatattttcgcccatcgctagaacttttaccgtttccattgagtatataactaagatgaatgaggctaattgatctcacaagtagagctacacggtcttagagctatgctggaaacagcatagcaagttaagataaggctagtccgttatcaacttgaaaaagtggcaccgagtcggtgctttttttaagatgcttcggcaattaataataaggaatggtaaagcattcttcaaatgttactatgttctcaaattttcaagaattaggtattcaagaaattctttcaggcatattccataatctgcacaagcagctactttagaaattattgccgggcttaaattatatgtacaacatttcctgagtattttctgacaaaaattctcacaagggaaggtcacgatggagttacacggggtttttaaccggactatttttgttagattctacatgtcgaaatatgaaaaaccccaaagcctttcgggtgatggaccagtggtgtagccaggaggggctctgaaaggggtaattttgtacgtatattatattattaagctaattggaaatttgacaaaaatatttttttagtatttattgtgatggtagagaacaaaattgacattaatgtacgtttgaaatgtatttgccatgcctttggcgtactaacatggagtatggacaccaaaaccgatttcggccttttgggcccggcgcgccaattcgagctcgcccggggatctaattcaattagagactaattcaattagagctaattcaattaggatccaagcttatcgatttcgaaccctcgaccgccggagtataaatagaggcgcttcgtctacggagcgacaattcaattcaaacaagcaaagtgaacacgtcgctaagcgaaagctaagcaaataaacaagcgcagctgaacaagctaaacaatcggggtaccgctagagtcgacggtacgatccaccggtcgccaccatggtgagcaagggcgaggaggtcatcaaagagttcatgcgcttcaaggtgcgcatggagggctccatgaacggccacgagttcgagatcgagggcgagggcgagggccgcccctacgagggcacccagaccgccaagctgaaggtgaccaagggcggccccctgcccttcgcctgggacatcctgtccccccagttcatgtacggctccaaggcgtacgtgaagcaccccgccgacatccccgattacaagaagctgtccttccccgagggcttcaagtgggagcgcgtgatgaacttcgaggacggcggtctggtgaccgtgacccaggactcctccctgcaggacggcacgctgatctacaaggtgaagatgcgcggcaccaacttcccccccgacggccccgtaatgcagaagaagaccatgggctgggaggcctccaccgagcgcctgtacccccgcgacggcgtgctgaagggcgagatccaccaggccctgaagctgaaggacggcggccactacctggtggagttcaagaccatctacatggccaagaagcccgtgcaactgcccggctactactacgtggacaccaagctggacatcacctcccacaacgaggactacaccatcgtggaacagtacgagcgctccgagggccgccaccacctgttcctggggcatggcaccggcagcaccggcagcggcagctccggcaccgcctcctccgaggacaacaacatggccgttatcaaggaatttatgcgcttcaaagttaggatggagggatccatgaacggacatgagttcgagatcgagggagagggcgagggacgcccgtatgaaggcacacaaacagccaaactcaaggtcaccaagggcggaccactgcccttcgcctgggatatcctgagtccccagtttatgtacggcagcaaggcctacgttaagcaccccgctgacataccggactacaaaaagctgtcctttccggaaggcttcaagtgggagcgcgtgatgaatttcgaagacggaggactggtcactgtgacccaagatagcagtttgcaggacggtacactgatctataaggttaaaatgcgcggcactaactttccgccagatggcccagtgatgcagaagaagaccatgggttgggaggcatccaccgaacgtctgtaccctcgagacggagtgctcaagggcgagatccatcaggccctcaaactgaaagatggtggtcactacctggtcgaatttaagaccatttacatggccaagaagccggttcagctgcccggatattattatgtggatacgaaactggatataacttcgcataacgaagactacaccattgtcgagcagtatgagcgcagcgaaggccgacatcacctgttcctctacggcatggacgagctgtacaagtaggcggccgcgactctagatcataatcagccataccacatttgtagaggttttacttgctttaaaaaacctcccacacctccccctgaacctgaaacataaaatgaatgcaattgttgttgttaacttgtttattgcagcttataatggttacaaataaagcaatagcatcacaaatttcacaaataaagcatttttttcactgcattctagttgtggtttgtccaaactcatcaatgtatcttaaagcttctaggccggccgatctcggatctgacaatgttcagtgcagagactcggctacgcctcgtggactttgaagttgaccaacaatgtttattcttacctctaatagtcctctgtggcaaggtcaagattctgttagaagccaatgaagaacctggttgttcaataacattttgttcgtctaatatttcactaccgcttgacgttggctgcacttcatgtacctcatctataaacgcttcttctgtatcgctctggacgtcatcttcacttacgtgatctgatatttcactgtcagaatcctcaccaacaagctcgtcatcgctttgcagaagagcagagaggatatgctcatcgtctaaagaactacccattttattatatattagtcacgatatctataacaagaaaatatatatataataagttatcacgtaagtagaacatgaaataacaatataattatcgtatgagttaaatcttaaaagtcacgtaaaagataatcatgcgtcattttgactcacgcggtcgttatagttcaaaatcagtgacacttaccgcattgacaagcacgcctcacgggagctccaagcggcgactgagatgtcctaaatgcacagcgacggattcgcgctatttagaaagagagagcaatatttcaagaatgcatgcgtcaattttacgcagactatctttctagggttaaaaaagatttgcgctttactcgacctaaactttaaacacgtcatagaatcttcgtttgacaaaaaccacattgtggccaagctgtgtgacgcgacgcgcgctaaagaatggcaaaccaagtcgcgcgagcgtcgactctagaggatccccgggtaccgagctcgaattcgtaatcatggtcatagctgtttcctgtgtgaaattgttatccgctcacaattccacacaacatacgagccggaagcataaagtgtaaagcctggggtgcctaatgagtgagctaactcacattaattgcgttgcgctcactgcccgctttccagtcgggaaacctgtcgtgccagctgcattaatgaatcggccaacgcgcggggagaggcggtttgcgtattgggcgctcttccgcttcctcgctcactgactcgctgcgctcggtcgttcggctgcggcgagcggtatcagctcactcaaaggcggtaatacggt

SEQ ID NO: 32 - DNA, 10398 bp, Artificial Sequence
  pBac-U6(AAEL017774)-sgDsx3-LongScaffold-3_UTR-U6(AAEL017763)-sgDs x4-LongScaffold-3_UTR-3xp3-tdTomato-v3-Revised
tatccacagaatcaggggataacgcaggaaagaacatgtgagcaaaaggccagcaaaaggccaggaaccgtaaaaaggccgcgttgctggcgtttttccataggctccgcccccctgacgagcatcacaaaaatcgacgctcaagtcagaggtggcgaaacccgacaggactataaagataccaggcgtttccccctggaagctccctcgtgcgctctcctgttccgaccctgccgcttaccggatacctgtccgcctttctcccttcgggaagcgtggcgctttctcaatgctcacgctgtaggtatctcagttcggtgtaggtcgttcgctccaagctgggctgtgtgcacgaaccccccgttcagcccgaccgctgcgccttatccggtaactatcgtcttgagtccaacccggtaagacacgacttatcgccactggcagcagccactggtaacaggattagcagagcgaggtatgtaggcggtgctacagagttcttgaagtggtggcctaactacggctacactagaaggacagtatttggtatctgcgctctgctgaagccagttaccttcggaaaaagagttggtagctcttgatccggcaaacaaaccaccgctggtagcggtggtttttttgtttgcaagcagcagattacgcgcagaaaaaaaggatctcaagaagatcctttgatcttttctacggggtctgacgctcagtggaacgaaaactcacgttaagggattttggtcatgagattatcaaaaaggatcttcacctagatccttttaaattaaaaatgaagttttaaatcaatctaaagtatatatgagtaaacttggtctgacagttaccaatgcttaatcagtgaggcacctatctcagcgatctgtctatttcgttcatccatagttgcctgactccccgtcgtgtagataactacgatacgggagggcttaccatctggccccagtgctgcaatgataccgcgagacccacgctcaccggctccagatttatcagcaataaaccagccagccggaagggccgagcgcagaagtggtcctgcaactttatccgcctccatccagtctattaattgttgccgggaagctagagtaagtagttcgccagttaatagtttgcgcaacgttgttgccattgctacaggcatcgtggtgtcacgctcgtcgtttggtatggcttcattcagctccggttcccaacgatcaaggcgagttacatgatcccccatgttgtgcaaaaaagcggttagctccttcggtcctccgatcgttgtcagaagtaagttggccgcagtgttatcactcatggttatggcagcactgcataattctcttactgtcatgccatccgtaagatgcttttctgtgactggtgagtactcaaccaagtcattctgagaatagtgtatgcggcgaccgagttgctcttgcccggcgtcaatacgggataataccgcgccacatagcagaactttaaaagtgctcatcattggaaaacgttcttcggggcgaaaactctcaaggatcttaccgctgttgagatccagttcgatgtaacccactcgtgcacccaactgatcttcagcatcttttactttcaccagcgtttctgggtgagcaaaaacaggaaggcaaaatgccgcaaaaaagggaataagggcgacacggaaatgttgaatactcatactcttcctttttcaatattattgaagcatttatcagggttattgtctcatgagcggatacatatttgaatgtatttagaaaaataaacaaataggggttccgcgcacatttccccgaaaagtgccacctgacgtctaagaaaccattattatcatgacattaacctataaaaataggcgtatcacgaggccctttcgtctcgcgcgtttcggtgatgacggtgaaaacctctgacacatgcagctcccggagacggtcacagcttgtctgtaagcggatgccgggagcagacaagcccgtcagggcgcgtcagcgggtgttggcgggtgtcggggctggcttaactatgcggcatcagagcagattgtactgagagtgcaccatatgcggtgtgaaataccgcacagatgcgtaaggagaaaataccgcatcaggcgccattcgccattcaggctgcgcaactgttgggaagggcgatcggtgcgggcctcttcgctattacgccagctggcgaaagggggatgtgctgcaaggcgattaagttgggtaacgccagggttttcccagtcacgacgttgtaaaacgacggccagtgccaagctttgtttaaaatataacaaaattgtgatcccacaaaatgaagtggggcaaaatcaaataattaactagtgtccgtaaacttgttggtcttcaactttttgaggaacacgttggacggcaaatcgtgactataacacaagttgatttaataattttagccaacacgtcgggctgcgtgttttttgcgctctgtgtacacgttgattaactggtcgattaaataatttaatttttggttcttctttaaatctgtgatgaaattttttaaaataactttaaattcttcattggtaaaaaatgccacgttttgcaacttgtgagggtctaatatgaggtcaaactcagtaggagttttatccaaaaaagaaaacatgattacgtctgtacacgaacgcgtattaacgcagagtgcaaagtataagagggttaaaaaatatattttacgcaccatatacgcatcgggttgatatcgttaatatggatcaatttgaacagttgattaacgtgtctctgctcaagtctttgatcaaaacgcaaatcgacgaaaatgtgtcggacaatatcaagtcgatgagcgaaaaactaaaaaggctagaatacgacaatctcacagacagcgttgagatatacggtattcacgacagcaggctgaataataaaaaaattagaaactattatttaaccctagaaagataatcatattgtgacgtacgttaaagataatcatgcgtaaaattgacgcatgtgttttatcggtctgtatatcgaggtttatttattaatttgaatagatattaagttttattatatttacacttacatactaataataaattcaacaaacaatttatttatgtttatttatttattaaaaaaaaacaaaaactcaaaatttcttctataaagtaacaaaacttttaaacattctctcttttacaaaaataaacttattttgtactttaaaaacagtcatgttgtattataaaataagtaattagcttaacttatacataatagaaacaaattatacttattagtcagtcagaaacaactttggcacatatcaatattatgctctcgacaaataacttttttgcattttttgcacgatgcatttgcctttcgccttattttagaggggcagtaagtacagtaagtacgttttttcattactggctcttcagtactgtcatctgatgtaccaggcacttcatttggcaaaatattagagatattatcgcgcaaatatctcttcaaagtaggagcttctaaacgcttacgcataaacgatgacgtcaggctcatgtaaaggtttctcataaattttttgcgactttgaaccttttctcccttgctactgacattatggctgtatataataaaagaatttatgcaggcaatgtttatcattccgtacaataatgccataggccacctattcgtcttcctactgcaggtcatcacagaacacatttggtctagcgtgtccactccgcctttagtttgattataatacataaccatttgcggtttaccggtactttcgttgatagaagcatcctcatcacaagatgataataagtataccatcttagctggcttcggtttatatgagacgagagtaaggggtccgtcaaaacaaaacatcgatgttcccactggcctggagcgactgtttttcagtacttccggtatctcgcgtttgtttgatcgcacggttcccacaatggttaattcgagctcgcccgggctcctaggagatcttcatcacaaacgaaactattataatcgtcttcaggggaacggtagcatcatatctgtcaccagtcagtcggattcctttctttcggcataaattatgctcgggtgacgagacgagttgaaaatcccgtaaattaaaacatataccacactcgccgtcctagacgacgacgacgacgacgattcccaaggaattgaacccttcatttgcatttcactaccgctctgagagatgcaaagcgcgccagacagtcgatcgaatctgcagaccagagagtcacatcaagaatgttgacattccaccagaagactctaattattcttcgctcgactgggaaaactgttaacaactgctcgagtgtggtcggagcggctcacagtgcgttttcccgtagacaaaaatcaaatttcatggtatttttcggcgataaacagtaagttaaagggaacccgaatttagtgctatataatttaattccactagagtttgtatcctttgatagatacgcgtatttcgacctcaactgcaaggccgtcgtgtactagacttgactaatccagactggtcttttagttatgacttctgtccacatctccatacattcaacgcactgtgcggctgtgctgtgcgactccgtcgagtcgaccaacatagttgaaacaaattgaatatttaattgatcgttataggaatggtgttagatgagtcatcctttacagtaagcacatacagtattataattgaagatcgtcggcagataggtgtgtagggtagagtatcagcaataagttgggacgtttgactttttgtaggtagacaaaaactaaactttttttcgcttctctatgtgtgcccctgggtagcgttccgttccgattggggtgcgaacgaatgaaatcgcccatcgagttgatacgtccatccatcgctagaaccgcgttcgctgtagaagactatataagagcagaggcaagagtagtgaaatggtagctggccgttgccaaagtcttagagctatgctggaaacagcatagcaagttaagataaggctagtccgttatcaacttgaaaaagtggcaccgagtcggtgctttttttggtggttgttcatcgattcctaatattgcagtgaagcagtttgttgtgcatggcgaagataaggttagggcgaggaatgccttggaaataagcggcactgggccgtatgaataaaaagcgttgaactttactacatgtagcatctactcaaaaacaaaatccacaaagtttactacacttttggtatgaataaaaaccttttcgaacatgtagtacctactactttaagaaaattctattcaaagtacagagtaatgctgcatgttaagaaaattccattcagagtgactcttgaaatcaataaaatcatgcatatatgccaaatttgtcacttattcacgtgacaaattatgtgaaaatatgaatattactacattcccgctatgcatcgcgtaatcgatcatgaaatttatgttggttatgtaactttacagtattccctttatgtgcatgtgaattttataatgatttgacaacaaggattttccttagaattttcgaattttagctagaaatctgtatcctatgaatgaatcttgagataacagcaattgtaacattataaagttcctaacattttcaagattccagtattgagtcgcgatcgcttaattaaccgcggatatgtcttgccgaagcacattaacccaagccatttatatatcaagtacaagttgatttgattctagtgatggactgacacgaatctatggcactgttgcagagcttacaaacaggtacccggagtcgcttcaattattcaatcatccattcaaaaacttccatctcttccaattagccaatattcaaattggaatccagccagccgacggaggcagatggtctacctggcaactatagagtttccatgtttccagactttccctcccggtaaacggagacaaaacgacagacgtaagtaggtacatatgcataccgcacggacaaatcaaatttgtctggcagctccaattagagtcgttaaaaatttaacgatgcgctaaataacttcaagctatttgtctcgctggattggcttcgagtggtaagatcctatcaaatgccgaaaacaaaaaactttcttcttaattgttcgttcttcaacacctctccatggtgataacggatacggtttcattgtcagcatccatcctccgaaaaatacattacgccttgaaatatgcaatcgcaaacacggatctgtttggaacatttattttactatgaagagatgcgataggtaatatttatttgagcgtttaagatactcattgttctctcaaagaatgtcattgaaagccaacgaggtcaaatcaaatattataataaaaaggtcaaagaggactaacttaaagctctctttatggataggaaaaaatattttcgcccatcgctagaacttttaccgtttccattgagtatataactaagatgaatgaggctaattgatctgtcgtcgtttttttccgggtcttagagctatgctggaaacagcatagcaagttaagataaggctagtccgttatcaacttgaaaaagtggcaccgagtcggtgctttttttaagatgcttcggcaattaataataaggaatggtaaagcattcttcaaatgttactatgttctcaaattttcaagaattaggtattcaagaaattctttcaggcatattccataatctgcacaagcagctactttagaaattattgccgggcttaaattatatgtacaacatttcctgagtattttctgacaaaaattctcacaagggaaggtcacgatggagttacacggggtttttaaccggactatttttgttagattctacatgtcgaaatatgaaaaaccccaaagcctttcgggtgatggaccagtggtgtagccaggaggggctctgaaaggggtaattttgtacgtatattatattattaagctaattggaaatttgacaaaaatatttttttagtatttattgtgatggtagagaacaaaattgacattaatgtacgtttgaaatgtatttgccatgcctttggcgtactaacatggagtatggacaccaaaaccgatttcggccttttgggcccggcgcgccaattcgagctcgcccggggatctaattcaattagagactaattcaattagagctaattcaattaggatccaagcttatcgatttcgaaccctcgaccgccggagtataaatagaggcgcttcgtctacggagcgacaattcaattcaaacaagcaaagtgaacacgtcgctaagcgaaagctaagcaaataaacaagcgcagctgaacaagctaaacaatcggggtaccgctagagtcgacggtacgatccaccggtcgccaccatggtgagcaagggcgaggaggtcatcaaagagttcatgcgcttcaaggtgcgcatggagggctccatgaacggccacgagttcgagatcgagggcgagggcgagggccgcccctacgagggcacccagaccgccaagctgaaggtgaccaagggcggccccctgcccttcgcctgggacatcctgtccccccagttcatgtacggctccaaggcgtacgtgaagcaccccgccgacatccccgattacaagaagctgtccttccccgagggcttcaagtgggagcgcgtgatgaacttcgaggacggcggtctggtgaccgtgacccaggactcctccctgcaggacggcacgctgatctacaaggtgaagatgcgcggcaccaacttcccccccgacggccccgtaatgcagaagaagaccatgggctgggaggcctccaccgagcgcctgtacccccgcgacggcgtgctgaagggcgagatccaccaggccctgaagctgaaggacggcggccactacctggtggagttcaagaccatctacatggccaagaagcccgtgcaactgcccggctactactacgtggacaccaagctggacatcacctcccacaacgaggactacaccatcgtggaacagtacgagcgctccgagggccgccaccacctgttcctggggcatggcaccggcagcaccggcagcggcagctccggcaccgcctcctccgaggacaacaacatggccgttatcaaggaatttatgcgcttcaaagttaggatggagggatccatgaacggacatgagttcgagatcgagggagagggcgagggacgcccgtatgaaggcacacaaacagccaaactcaaggtcaccaagggcggaccactgcccttcgcctgggatatcctgagtccccagtttatgtacggcagcaaggcctacgttaagcaccccgctgacataccggactacaaaaagctgtcctttccggaaggcttcaagtgggagcgcgtgatgaatttcgaagacggaggactggtcactgtgacccaagatagcagtttgcaggacggtacactgatctataaggttaaaatgcgcggcactaactttccgccagatggcccagtgatgcagaagaagaccatgggttgggaggcatccaccgaacgtctgtaccctcgagacggagtgctcaagggcgagatccatcaggccctcaaactgaaagatggtggtcactacctggtcgaatttaagaccatttacatggccaagaagccggttcagctgcccggatattattatgtggatacgaaactggatataacttcgcataacgaagactacaccattgtcgagcagtatgagcgcagcgaaggccgacatcacctgttcctctacggcatggacgagctgtacaagtaggcggccgcgactctagatcataatcagccataccacatttgtagaggttttacttgctttaaaaaacctcccacacctccccctgaacctgaaacataaaatgaatgcaattgttgttgttaacttgtttattgcagcttataatggttacaaataaagcaatagcatcacaaatttcacaaataaagcatttttttcactgcattctagttgtggtttgtccaaactcatcaatgtatcttaaagcttctaggccggccgatctcggatctgacaatgttcagtgcagagactcggctacgcctcgtggactttgaagttgaccaacaatgtttattcttacctctaatagtcctctgtggcaaggtcaagattctgttagaagccaatgaagaacctggttgttcaataacattttgttcgtctaatatttcactaccgcttgacgttggctgcacttcatgtacctcatctataaacgcttcttctgtatcgctctggacgtcatcttcacttacgtgatctgatatttcactgtcagaatcctcaccaacaagctcgtcatcgctttgcagaagagcagagaggatatgctcatcgtctaaagaactacccattttattatatattagtcacgatatctataacaagaaaatatatatataataagttatcacgtaagtagaacatgaaataacaatataattatcgtatgagttaaatcttaaaagtcacgtaaaagataatcatgcgtcattttgactcacgcggtcgttatagttcaaaatcagtgacacttaccgcattgacaagcacgcctcacgggagctccaagcggcgactgagatgtcctaaatgcacagcgacggattcgcgctatttagaaagagagagcaatatttcaagaatgcatgcgtcaattttacgcagactatctttctagggttaaaaaagatttgcgctttactcgacctaaactttaaacacgtcatagaatcttcgtttgacaaaaaccacattgtggccaagctgtgtgacgcgacgcgcgctaaagaatggcaaaccaagtcgcgcgagcgtcgactctagaggatccccgggtaccgagctcgaattcgtaatcatggtcatagctgtttcctgtgtgaaattgttatccgctcacaattccacacaacatacgagccggaagcataaagtgtaaagcctggggtgcctaatgagtgagctaactcacattaattgcgttgcgctcactgcccgctttccagtcgggaaacctgtcgtgccagctgcattaatgaatcggccaacgcgcggggagaggcggtttgcgtattgggcgctcttccgcttcctcgctcactgactcgctgcgctcggtcgttcggctgcggcgagcggtatcagctcactcaaaggcggtaatacggt

SEQ ID NO: 33 - DNA, 10398 bp, Artificial Sequence
  pBac-U6(AAEL017774)-sgZpg1-LongScaffold-3_UTR-U6(AAEL017763)-sgZp g2-LongScaffold-3_UTR-3xp3-tdTomato-v3
tatccacagaatcaggggataacgcaggaaagaacatgtgagcaaaaggccagcaaaaggccaggaaccgtaaaaaggccgcgttgctggcgtttttccataggctccgcccccctgacgagcatcacaaaaatcgacgctcaagtcagaggtggcgaaacccgacaggactataaagataccaggcgtttccccctggaagctccctcgtgcgctctcctgttccgaccctgccgcttaccggatacctgtccgcctttctcccttcgggaagcgtggcgctttctcaatgctcacgctgtaggtatctcagttcggtgtaggtcgttcgctccaagctgggctgtgtgcacgaaccccccgttcagcccgaccgctgcgccttatccggtaactatcgtcttgagtccaacccggtaagacacgacttatcgccactggcagcagccactggtaacaggattagcagagcgaggtatgtaggcggtgctacagagttcttgaagtggtggcctaactacggctacactagaaggacagtatttggtatctgcgctctgctgaagccagttaccttcggaaaaagagttggtagctcttgatccggcaaacaaaccaccgctggtagcggtggtttttttgtttgcaagcagcagattacgcgcagaaaaaaaggatctcaagaagatcctttgatcttttctacggggtctgacgctcagtggaacgaaaactcacgttaagggattttggtcatgagattatcaaaaaggatcttcacctagatccttttaaattaaaaatgaagttttaaatcaatctaaagtatatatgagtaaacttggtctgacagttaccaatgcttaatcagtgaggcacctatctcagcgatctgtctatttcgttcatccatagttgcctgactccccgtcgtgtagataactacgatacgggagggcttaccatctggccccagtgctgcaatgataccgcgagacccacgctcaccggctccagatttatcagcaataaaccagccagccggaagggccgagcgcagaagtggtcctgcaactttatccgcctccatccagtctattaattgttgccgggaagctagagtaagtagttcgccagttaatagtttgcgcaacgttgttgccattgctacaggcatcgtggtgtcacgctcgtcgtttggtatggcttcattcagctccggttcccaacgatcaaggcgagttacatgatcccccatgttgtgcaaaaaagcggttagctccttcggtcctccgatcgttgtcagaagtaagttggccgcagtgttatcactcatggttatggcagcactgcataattctcttactgtcatgccatccgtaagatgcttttctgtgactggtgagtactcaaccaagtcattctgagaatagtgtatgcggcgaccgagttgctcttgcccggcgtcaatacgggataataccgcgccacatagcagaactttaaaagtgctcatcattggaaaacgttcttcggggcgaaaactctcaaggatcttaccgctgttgagatccagttcgatgtaacccactcgtgcacccaactgatcttcagcatcttttactttcaccagcgtttctgggtgagcaaaaacaggaaggcaaaatgccgcaaaaaagggaataagggcgacacggaaatgttgaatactcatactcttcctttttcaatattattgaagcatttatcagggttattgtctcatgagcggatacatatttgaatgtatttagaaaaataaacaaataggggttccgcgcacatttccccgaaaagtgccacctgacgtctaagaaaccattattatcatgacattaacctataaaaataggcgtatcacgaggccctttcgtctcgcgcgtttcggtgatgacggtgaaaacctctgacacatgcagctcccggagacggtcacagcttgtctgtaagcggatgccgggagcagacaagcccgtcagggcgcgtcagcgggtgttggcgggtgtcggggctggcttaactatgcggcatcagagcagattgtactgagagtgcaccatatgcggtgtgaaataccgcacagatgcgtaaggagaaaataccgcatcaggcgccattcgccattcaggctgcgcaactgttgggaagggcgatcggtgcgggcctcttcgctattacgccagctggcgaaagggggatgtgctgcaaggcgattaagttgggtaacgccagggttttcccagtcacgacgttgtaaaacgacggccagtgccaagctttgtttaaaatataacaaaattgtgatcccacaaaatgaagtggggcaaaatcaaataattaactagtgtccgtaaacttgttggtcttcaactttttgaggaacacgttggacggcaaatcgtgactataacacaagttgatttaataattttagccaacacgtcgggctgcgtgttttttgcgctctgtgtacacgttgattaactggtcgattaaataatttaatttttggttcttctttaaatctgtgatgaaattttttaaaataactttaaattcttcattggtaaaaaatgccacgttttgcaacttgtgagggtctaatatgaggtcaaactcagtaggagttttatccaaaaaagaaaacatgattacgtctgtacacgaacgcgtattaacgcagagtgcaaagtataagagggttaaaaaatatattttacgcaccatatacgcatcgggttgatatcgttaatatggatcaatttgaacagttgattaacgtgtctctgctcaagtctttgatcaaaacgcaaatcgacgaaaatgtgtcggacaatatcaagtcgatgagcgaaaaactaaaaaggctagaatacgacaatctcacagacagcgttgagatatacggtattcacgacagcaggctgaataataaaaaaattagaaactattatttaaccctagaaagataatcatattgtgacgtacgttaaagataatcatgcgtaaaattgacgcatgtgttttatcggtctgtatatcgaggtttatttattaatttgaatagatattaagttttattatatttacacttacatactaataataaattcaacaaacaatttatttatgtttatttatttattaaaaaaaaacaaaaactcaaaatttcttctataaagtaacaaaacttttaaacattctctcttttacaaaaataaacttattttgtactttaaaaacagtcatgttgtattataaaataagtaattagcttaacttatacataatagaaacaaattatacttattagtcagtcagaaacaactttggcacatatcaatattatgctctcgacaaataacttttttgcattttttgcacgatgcatttgcctttcgccttattttagaggggcagtaagtacagtaagtacgttttttcattactggctcttcagtactgtcatctgatgtaccaggcacttcatttggcaaaatattagagatattatcgcgcaaatatctcttcaaagtaggagcttctaaacgcttacgcataaacgatgacgtcaggctcatgtaaaggtttctcataaattttttgcgactttgaaccttttctcccttgctactgacattatggctgtatataataaaagaatttatgcaggcaatgtttatcattccgtacaataatgccataggccacctattcgtcttcctactgcaggtcatcacagaacacatttggtctagcgtgtccactccgcctttagtttgattataatacataaccatttgcggtttaccggtactttcgttgatagaagcatcctcatcacaagatgataataagtataccatcttagctggcttcggtttatatgagacgagagtaaggggtccgtcaaaacaaaacatcgatgttcccactggcctggagcgactgtttttcagtacttccggtatctcgcgtttgtttgatcgcacggttcccacaatggttaattcgagctcgcccgggctcctaggagatcttcatcacaaacgaaactattataatcgtcttcaggggaacggtagcatcatatctgtcaccagtcagtcggattcctttctttcggcataaattatgctcgggtgacgagacgagttgaaaatcccgtaaattaaaacatataccacactcgccgtcctagacgacgacgacgacgacgattcccaaggaattgaacccttcatttgcatttcactaccgctctgagagatgcaaagcgcgccagacagtcgatcgaatctgcagaccagagagtcacatcaagaatgttgacattccaccagaagactctaattattcttcgctcgactgggaaaactgttaacaactgctcgagtgtggtcggagcggctcacagtgcgttttcccgtagacaaaaatcaaatttcatggtatttttcggcgataaacagtaagttaaagggaacccgaatttagtgctatataatttaattccactagagtttgtatcctttgatagatacgcgtatttcgacctcaactgcaaggccgtcgtgtactagacttgactaatccagactggtcttttagttatgacttctgtccacatctccatacattcaacgcactgtgcggctgtgctgtgcgactccgtcgagtcgaccaacatagttgaaacaaattgaatatttaattgatcgttataggaatggtgttagatgagtcatcctttacagtaagcacatacagtattataattgaagatcgtcggcagataggtgtgtagggtagagtatcagcaataagttgggacgtttgactttttgtaggtagacaaaaactaaactttttttcgcttctctatgtgtgcccctgggtagcgttccgttccgattggggtgcgaacgaatgaaatcgcccatcgagttgatacgtccatccatcgctagaaccgcgttcgctgtagaagactatataagagcagaggcaagagtagtgaaatgtgtagactggccctaacgggtcttagagctatgctggaaacagcatagcaagttaagataaggctagtccgttatcaacttgaaaaagtggcaccgagtcggtgctttttttggtggttgttcatcgattcctaatattgcagtgaagcagtttgttgtgcatggcgaagataaggttagggcgaggaatgccttggaaataagcggcactgggccgtatgaataaaaagcgttgaactttactacatgtagcatctactcaaaaacaaaatccacaaagtttactacacttttggtatgaataaaaaccttttcgaacatgtagtacctactactttaagaaaattctattcaaagtacagagtaatgctgcatgttaagaaaattccattcagagtgactcttgaaatcaataaaatcatgcatatatgccaaatttgtcacttattcacgtgacaaattatgtgaaaatatgaatattactacattcccgctatgcatcgcgtaatcgatcatgaaatttatgttggttatgtaactttacagtattccctttatgtgcatgtgaattttataatgatttgacaacaaggattttccttagaattttcgaattttagctagaaatctgtatcctatgaatgaatcttgagataacagcaattgtaacattataaagttcctaacattttcaagattccagtattgagtcgcgatcgcttaattaaccgcggatatgtcttgccgaagcacattaacccaagccatttatatatcaagtacaagttgatttgattctagtgatggactgacacgaatctatggcactgttgcagagcttacaaacaggtacccggagtcgcttcaattattcaatcatccattcaaaaacttccatctcttccaattagccaatattcaaattggaatccagccagccgacggaggcagatggtctacctggcaactatagagtttccatgtttccagactttccctcccggtaaacggagacaaaacgacagacgtaagtaggtacatatgcataccgcacggacaaatcaaatttgtctggcagctccaattagagtcgttaaaaatttaacgatgcgctaaataacttcaagctatttgtctcgctggattggcttcgagtggtaagatcctatcaaatgccgaaaacaaaaaactttcttcttaattgttcgttcttcaacacctctccatggtgataacggatacggtttcattgtcagcatccatcctccgaaaaatacattacgccttgaaatatgcaatcgcaaacacggatctgtttggaacatttattttactatgaagagatgcgataggtaatatttatttgagcgtttaagatactcattgttctctcaaagaatgtcattgaaagccaacgaggtcaaatcaaatattataataaaaaggtcaaagaggactaacttaaagctctctttatggataggaaaaaatattttcgcccatcgctagaacttttaccgtttccattgagtatataactaagatgaatgaggctaattgattctcgttccccaaacacttggtcttagagctatgctggaaacagcatagcaagttaagataaggctagtccgttatcaacttgaaaaagtggcaccgagtcggtgctttttttaagatgcttcggcaattaataataaggaatggtaaagcattcttcaaatgttactatgttctcaaattttcaagaattaggtattcaagaaattctttcaggcatattccataatctgcacaagcagctactttagaaattattgccgggcttaaattatatgtacaacatttcctgagtattttctgacaaaaattctcacaagggaaggtcacgatggagttacacggggtttttaaccggactatttttgttagattctacatgtcgaaatatgaaaaaccccaaagcctttcgggtgatggaccagtggtgtagccaggaggggctctgaaaggggtaattttgtacgtatattatattattaagctaattggaaatttgacaaaaatatttttttagtatttattgtgatggtagagaacaaaattgacattaatgtacgtttgaaatgtatttgccatgcctttggcgtactaacatggagtatggacaccaaaaccgatttcggccttttgggcccggcgcgccaattcgagctcgcccggggatctaattcaattagagactaattcaattagagctaattcaattaggatccaagcttatcgatttcgaaccctcgaccgccggagtataaatagaggcgcttcgtctacggagcgacaattcaattcaaacaagcaaagtgaacacgtcgctaagcgaaagctaagcaaataaacaagcgcagctgaacaagctaaacaatcggggtaccgctagagtcgacggtacgatccaccggtcgccaccatggtgagcaagggcgaggaggtcatcaaagagttcatgcgcttcaaggtgcgcatggagggctccatgaacggccacgagttcgagatcgagggcgagggcgagggccgcccctacgagggcacccagaccgccaagctgaaggtgaccaagggcggccccctgcccttcgcctgggacatcctgtccccccagttcatgtacggctccaaggcgtacgtgaagcaccccgccgacatccccgattacaagaagctgtccttccccgagggcttcaagtgggagcgcgtgatgaacttcgaggacggcggtctggtgaccgtgacccaggactcctccctgcaggacggcacgctgatctacaaggtgaagatgcgcggcaccaacttcccccccgacggccccgtaatgcagaagaagaccatgggctgggaggcctccaccgagcgcctgtacccccgcgacggcgtgctgaagggcgagatccaccaggccctgaagctgaaggacggcggccactacctggtggagttcaagaccatctacatggccaagaagcccgtgcaactgcccggctactactacgtggacaccaagctggacatcacctcccacaacgaggactacaccatcgtggaacagtacgagcgctccgagggccgccaccacctgttcctggggcatggcaccggcagcaccggcagcggcagctccggcaccgcctcctccgaggacaacaacatggccgttatcaaggaatttatgcgcttcaaagttaggatggagggatccatgaacggacatgagttcgagatcgagggagagggcgagggacgcccgtatgaaggcacacaaacagccaaactcaaggtcaccaagggcggaccactgcccttcgcctgggatatcctgagtccccagtttatgtacggcagcaaggcctacgttaagcaccccgctgacataccggactacaaaaagctgtcctttccggaaggcttcaagtgggagcgcgtgatgaatttcgaagacggaggactggtcactgtgacccaagatagcagtttgcaggacggtacactgatctataaggttaaaatgcgcggcactaactttccgccagatggcccagtgatgcagaagaagaccatgggttgggaggcatccaccgaacgtctgtaccctcgagacggagtgctcaagggcgagatccatcaggccctcaaactgaaagatggtggtcactacctggtcgaatttaagaccatttacatggccaagaagccggttcagctgcccggatattattatgtggatacgaaactggatataacttcgcataacgaagactacaccattgtcgagcagtatgagcgcagcgaaggccgacatcacctgttcctctacggcatggacgagctgtacaagtaggcggccgcgactctagatcataatcagccataccacatttgtagaggttttacttgctttaaaaaacctcccacacctccccctgaacctgaaacataaaatgaatgcaattgttgttgttaacttgtttattgcagcttataatggttacaaataaagcaatagcatcacaaatttcacaaataaagcatttttttcactgcattctagttgtggtttgtccaaactcatcaatgtatcttaaagcttctaggccggccgatctcggatctgacaatgttcagtgcagagactcggctacgcctcgtggactttgaagttgaccaacaatgtttattcttacctctaatagtcctctgtggcaaggtcaagattctgttagaagccaatgaagaacctggttgttcaataacattttgttcgtctaatatttcactaccgcttgacgttggctgcacttcatgtacctcatctataaacgcttcttctgtatcgctctggacgtcatcttcacttacgtgatctgatatttcactgtcagaatcctcaccaacaagctcgtcatcgctttgcagaagagcagagaggatatgctcatcgtctaaagaactacccattttattatatattagtcacgatatctataacaagaaaatatatatataataagttatcacgtaagtagaacatgaaataacaatataattatcgtatgagttaaatcttaaaagtcacgtaaaagataatcatgcgtcattttgactcacgcggtcgttatagttcaaaatcagtgacacttaccgcattgacaagcacgcctcacgggagctccaagcggcgactgagatgtcctaaatgcacagcgacggattcgcgctatttagaaagagagagcaatatttcaagaatgcatgcgtcaattttacgcagactatctttctagggttaaaaaagatttgcgctttactcgacctaaactttaaacacgtcatagaatcttcgtttgacaaaaaccacattgtggccaagctgtgtgacgcgacgcgcgctaaagaatggcaaaccaagtcgcgcgagcgtcgactctagaggatccccgggtaccgagctcgaattcgtaatcatggtcatagctgtttcctgtgtgaaattgttatccgctcacaattccacacaacatacgagccggaagcataaagtgtaaagcctggggtgcctaatgagtgagctaactcacattaattgcgttgcgctcactgcccgctttccagtcgggaaacctgtcgtgccagctgcattaatgaatcggccaacgcgcggggagaggcggtttgcgtattgggcgctcttccgcttcctcgctcactgactcgctgcgctcggtcgttcggctgcggcgagcggtatcagctcactcaaaggcggtaatacggt

SEQ ID NO: 34 - DNA, 10398 bp, Artificial Sequence
  pBac-U6(AAEL017774)-sgZpg3-LongScaffold-3_UTR-U6(AAEL017763)-sgZp g4-LongScaffold-3_UTR-3xp3-tdTomato-v3
tatccacagaatcaggggataacgcaggaaagaacatgtgagcaaaaggccagcaaaaggccaggaaccgtaaaaaggccgcgttgctggcgtttttccataggctccgcccccctgacgagcatcacaaaaatcgacgctcaagtcagaggtggcgaaacccgacaggactataaagataccaggcgtttccccctggaagctccctcgtgcgctctcctgttccgaccctgccgcttaccggatacctgtccgcctttctcccttcgggaagcgtggcgctttctcaatgctcacgctgtaggtatctcagttcggtgtaggtcgttcgctccaagctgggctgtgtgcacgaaccccccgttcagcccgaccgctgcgccttatccggtaactatcgtcttgagtccaacccggtaagacacgacttatcgccactggcagcagccactggtaacaggattagcagagcgaggtatgtaggcggtgctacagagttcttgaagtggtggcctaactacggctacactagaaggacagtatttggtatctgcgctctgctgaagccagttaccttcggaaaaagagttggtagctcttgatccggcaaacaaaccaccgctggtagcggtggtttttttgtttgcaagcagcagattacgcgcagaaaaaaaggatctcaagaagatcctttgatcttttctacggggtctgacgctcagtggaacgaaaactcacgttaagggattttggtcatgagattatcaaaaaggatcttcacctagatccttttaaattaaaaatgaagttttaaatcaatctaaagtatatatgagtaaacttggtctgacagttaccaatgcttaatcagtgaggcacctatctcagcgatctgtctatttcgttcatccatagttgcctgactccccgtcgtgtagataactacgatacgggagggcttaccatctggccccagtgctgcaatgataccgcgagacccacgctcaccggctccagatttatcagcaataaaccagccagccggaagggccgagcgcagaagtggtcctgcaactttatccgcctccatccagtctattaattgttgccgggaagctagagtaagtagttcgccagttaatagtttgcgcaacgttgttgccattgctacaggcatcgtggtgtcacgctcgtcgtttggtatggcttcattcagctccggttcccaacgatcaaggcgagttacatgatcccccatgttgtgcaaaaaagcggttagctccttcggtcctccgatcgttgtcagaagtaagttggccgcagtgttatcactcatggttatggcagcactgcataattctcttactgtcatgccatccgtaagatgcttttctgtgactggtgagtactcaaccaagtcattctgagaatagtgtatgcggcgaccgagttgctcttgcccggcgtcaatacgggataataccgcgccacatagcagaactttaaaagtgctcatcattggaaaacgttcttcggggcgaaaactctcaaggatcttaccgctgttgagatccagttcgatgtaacccactcgtgcacccaactgatcttcagcatcttttactttcaccagcgtttctgggtgagcaaaaacaggaaggcaaaatgccgcaaaaaagggaataagggcgacacggaaatgttgaatactcatactcttcctttttcaatattattgaagcatttatcagggttattgtctcatgagcggatacatatttgaatgtatttagaaaaataaacaaataggggttccgcgcacatttccccgaaaagtgccacctgacgtctaagaaaccattattatcatgacattaacctataaaaataggcgtatcacgaggccctttcgtctcgcgcgtttcggtgatgacggtgaaaacctctgacacatgcagctcccggagacggtcacagcttgtctgtaagcggatgccgggagcagacaagcccgtcagggcgcgtcagcgggtgttggcgggtgtcggggctggcttaactatgcggcatcagagcagattgtactgagagtgcaccatatgcggtgtgaaataccgcacagatgcgtaaggagaaaataccgcatcaggcgccattcgccattcaggctgcgcaactgttgggaagggcgatcggtgcgggcctcttcgctattacgccagctggcgaaagggggatgtgctgcaaggcgattaagttgggtaacgccagggttttcccagtcacgacgttgtaaaacgacggccagtgccaagctttgtttaaaatataacaaaattgtgatcccacaaaatgaagtggggcaaaatcaaataattaactagtgtccgtaaacttgttggtcttcaactttttgaggaacacgttggacggcaaatcgtgactataacacaagttgatttaataattttagccaacacgtcgggctgcgtgttttttgcgctctgtgtacacgttgattaactggtcgattaaataatttaatttttggttcttctttaaatctgtgatgaaattttttaaaataactttaaattcttcattggtaaaaaatgccacgttttgcaacttgtgagggtctaatatgaggtcaaactcagtaggagttttatccaaaaaagaaaacatgattacgtctgtacacgaacgcgtattaacgcagagtgcaaagtataagagggttaaaaaatatattttacgcaccatatacgcatcgggttgatatcgttaatatggatcaatttgaacagttgattaacgtgtctctgctcaagtctttgatcaaaacgcaaatcgacgaaaatgtgtcggacaatatcaagtcgatgagcgaaaaactaaaaaggctagaatacgacaatctcacagacagcgttgagatatacggtattcacgacagcaggctgaataataaaaaaattagaaactattatttaaccctagaaagataatcatattgtgacgtacgttaaagataatcatgcgtaaaattgacgcatgtgttttatcggtctgtatatcgaggtttatttattaatttgaatagatattaagttttattatatttacacttacatactaataataaattcaacaaacaatttatttatgtttatttatttattaaaaaaaaacaaaaactcaaaatttcttctataaagtaacaaaacttttaaacattctctcttttacaaaaataaacttattttgtactttaaaaacagtcatgttgtattataaaataagtaattagcttaacttatacataatagaaacaaattatacttattagtcagtcagaaacaactttggcacatatcaatattatgctctcgacaaataacttttttgcattttttgcacgatgcatttgcctttcgccttattttagaggggcagtaagtacagtaagtacgttttttcattactggctcttcagtactgtcatctgatgtaccaggcacttcatttggcaaaatattagagatattatcgcgcaaatatctcttcaaagtaggagcttctaaacgcttacgcataaacgatgacgtcaggctcatgtaaaggtttctcataaattttttgcgactttgaaccttttctcccttgctactgacattatggctgtatataataaaagaatttatgcaggcaatgtttatcattccgtacaataatgccataggccacctattcgtcttcctactgcaggtcatcacagaacacatttggtctagcgtgtccactccgcctttagtttgattataatacataaccatttgcggtttaccggtactttcgttgatagaagcatcctcatcacaagatgataataagtataccatcttagctggcttcggtttatatgagacgagagtaaggggtccgtcaaaacaaaacatcgatgttcccactggcctggagcgactgtttttcagtacttccggtatctcgcgtttgtttgatcgcacggttcccacaatggttaattcgagctcgcccgggctcctaggagatcttcatcacaaacgaaactattataatcgtcttcaggggaacggtagcatcatatctgtcaccagtcagtcggattcctttctttcggcataaattatgctcgggtgacgagacgagttgaaaatcccgtaaattaaaacatataccacactcgccgtcctagacgacgacgacgacgacgattcccaaggaattgaacccttcatttgcatttcactaccgctctgagagatgcaaagcgcgccagacagtcgatcgaatctgcagaccagagagtcacatcaagaatgttgacattccaccagaagactctaattattcttcgctcgactgggaaaactgttaacaactgctcgagtgtggtcggagcggctcacagtgcgttttcccgtagacaaaaatcaaatttcatggtatttttcggcgataaacagtaagttaaagggaacccgaatttagtgctatataatttaattccactagagtttgtatcctttgatagatacgcgtatttcgacctcaactgcaaggccgtcgtgtactagacttgactaatccagactggtcttttagttatgacttctgtccacatctccatacattcaacgcactgtgcggctgtgctgtgcgactccgtcgagtcgaccaacatagttgaaacaaattgaatatttaattgatcgttataggaatggtgttagatgagtcatcctttacagtaagcacatacagtattataattgaagatcgtcggcagataggtgtgtagggtagagtatcagcaataagttgggacgtttgactttttgtaggtagacaaaaactaaactttttttcgcttctctatgtgtgcccctgggtagcgttccgttccgattggggtgcgaacgaatgaaatcgcccatcgagttgatacgtccatccatcgctagaaccgcgttcgctgtagaagactatataagagcagaggcaagagtagtgaaattcatcaagaacatgttcagggtcttagagctatgctggaaacagcatagcaagttaagataaggctagtccgttatcaacttgaaaaagtggcaccgagtcggtgctttttttggtggttgttcatcgattcctaatattgcagtgaagcagtttgttgtgcatggcgaagataaggttagggcgaggaatgccttggaaataagcggcactgggccgtatgaataaaaagcgttgaactttactacatgtagcatctactcaaaaacaaaatccacaaagtttactacacttttggtatgaataaaaaccttttcgaacatgtagtacctactactttaagaaaattctattcaaagtacagagtaatgctgcatgttaagaaaattccattcagagtgactcttgaaatcaataaaatcatgcatatatgccaaatttgtcacttattcacgtgacaaattatgtgaaaatatgaatattactacattcccgctatgcatcgcgtaatcgatcatgaaatttatgttggttatgtaactttacagtattccctttatgtgcatgtgaattttataatgatttgacaacaaggattttccttagaattttcgaattttagctagaaatctgtatcctatgaatgaatcttgagataacagcaattgtaacattataaagttcctaacattttcaagattccagtattgagtcgcgatcgcttaattaaccgcggatatgtcttgccgaagcacattaacccaagccatttatatatcaagtacaagttgatttgattctagtgatggactgacacgaatctatggcactgttgcagagcttacaaacaggtacccggagtcgcttcaattattcaatcatccattcaaaaacttccatctcttccaattagccaatattcaaattggaatccagccagccgacggaggcagatggtctacctggcaactatagagtttccatgtttccagactttccctcccggtaaacggagacaaaacgacagacgtaagtaggtacatatgcataccgcacggacaaatcaaatttgtctggcagctccaattagagtcgttaaaaatttaacgatgcgctaaataacttcaagctatttgtctcgctggattggcttcgagtggtaagatcctatcaaatgccgaaaacaaaaaactttcttcttaattgttcgttcttcaacacctctccatggtgataacggatacggtttcattgtcagcatccatcctccgaaaaatacattacgccttgaaatatgcaatcgcaaacacggatctgtttggaacatttattttactatgaagagatgcgataggtaatatttatttgagcgtttaagatactcattgttctctcaaagaatgtcattgaaagccaacgaggtcaaatcaaatattataataaaaaggtcaaagaggactaacttaaagctctctttatggataggaaaaaatattttcgcccatcgctagaacttttaccgtttccattgagtatataactaagatgaatgaggctaattgatacagttggaaccgaacgctggtcttagagctatgctggaaacagcatagcaagttaagataaggctagtccgttatcaacttgaaaaagtggcaccgagtcggtgctttttttaagatgcttcggcaattaataataaggaatggtaaagcattcttcaaatgttactatgttctcaaattttcaagaattaggtattcaagaaattctttcaggcatattccataatctgcacaagcagctactttagaaattattgccgggcttaaattatatgtacaacatttcctgagtattttctgacaaaaattctcacaagggaaggtcacgatggagttacacggggtttttaaccggactatttttgttagattctacatgtcgaaatatgaaaaaccccaaagcctttcgggtgatggaccagtggtgtagccaggaggggctctgaaaggggtaattttgtacgtatattatattattaagctaattggaaatttgacaaaaatatttttttagtatttattgtgatggtagagaacaaaattgacattaatgtacgtttgaaatgtatttgccatgcctttggcgtactaacatggagtatggacaccaaaaccgatttcggccttttgggcccggcgcgccaattcgagctcgcccggggatctaattcaattagagactaattcaattagagctaattcaattaggatccaagcttatcgatttcgaaccctcgaccgccggagtataaatagaggcgcttcgtctacggagcgacaattcaattcaaacaagcaaagtgaacacgtcgctaagcgaaagctaagcaaataaacaagcgcagctgaacaagctaaacaatcggggtaccgctagagtcgacggtacgatccaccggtcgccaccatggtgagcaagggcgaggaggtcatcaaagagttcatgcgcttcaaggtgcgcatggagggctccatgaacggccacgagttcgagatcgagggcgagggcgagggccgcccctacgagggcacccagaccgccaagctgaaggtgaccaagggcggccccctgcccttcgcctgggacatcctgtccccccagttcatgtacggctccaaggcgtacgtgaagcaccccgccgacatccccgattacaagaagctgtccttccccgagggcttcaagtgggagcgcgtgatgaacttcgaggacggcggtctggtgaccgtgacccaggactcctccctgcaggacggcacgctgatctacaaggtgaagatgcgcggcaccaacttcccccccgacggccccgtaatgcagaagaagaccatgggctgggaggcctccaccgagcgcctgtacccccgcgacggcgtgctgaagggcgagatccaccaggccctgaagctgaaggacggcggccactacctggtggagttcaagaccatctacatggccaagaagcccgtgcaactgcccggctactactacgtggacaccaagctggacatcacctcccacaacgaggactacaccatcgtggaacagtacgagcgctccgagggccgccaccacctgttcctggggcatggcaccggcagcaccggcagcggcagctccggcaccgcctcctccgaggacaacaacatggccgttatcaaggaatttatgcgcttcaaagttaggatggagggatccatgaacggacatgagttcgagatcgagggagagggcgagggacgcccgtatgaaggcacacaaacagccaaactcaaggtcaccaagggcggaccactgcccttcgcctgggatatcctgagtccccagtttatgtacggcagcaaggcctacgttaagcaccccgctgacataccggactacaaaaagctgtcctttccggaaggcttcaagtgggagcgcgtgatgaatttcgaagacggaggactggtcactgtgacccaagatagcagtttgcaggacggtacactgatctataaggttaaaatgcgcggcactaactttccgccagatggcccagtgatgcagaagaagaccatgggttgggaggcatccaccgaacgtctgtaccctcgagacggagtgctcaagggcgagatccatcaggccctcaaactgaaagatggtggtcactacctggtcgaatttaagaccatttacatggccaagaagccggttcagctgcccggatattattatgtggatacgaaactggatataacttcgcataacgaagactacaccattgtcgagcagtatgagcgcagcgaaggccgacatcacctgttcctctacggcatggacgagctgtacaagtaggcggccgcgactctagatcataatcagccataccacatttgtagaggttttacttgctttaaaaaacctcccacacctccccctgaacctgaaacataaaatgaatgcaattgttgttgttaacttgtttattgcagcttataatggttacaaataaagcaatagcatcacaaatttcacaaataaagcatttttttcactgcattctagttgtggtttgtccaaactcatcaatgtatcttaaagcttctaggccggccgatctcggatctgacaatgttcagtgcagagactcggctacgcctcgtggactttgaagttgaccaacaatgtttattcttacctctaatagtcctctgtggcaaggtcaagattctgttagaagccaatgaagaacctggttgttcaataacattttgttcgtctaatatttcactaccgcttgacgttggctgcacttcatgtacctcatctataaacgcttcttctgtatcgctctggacgtcatcttcacttacgtgatctgatatttcactgtcagaatcctcaccaacaagctcgtcatcgctttgcagaagagcagagaggatatgctcatcgtctaaagaactacccattttattatatattagtcacgatatctataacaagaaaatatatatataataagttatcacgtaagtagaacatgaaataacaatataattatcgtatgagttaaatcttaaaagtcacgtaaaagataatcatgcgtcattttgactcacgcggtcgttatagttcaaaatcagtgacacttaccgcattgacaagcacgcctcacgggagctccaagcggcgactgagatgtcctaaatgcacagcgacggattcgcgctatttagaaagagagagcaatatttcaagaatgcatgcgtcaattttacgcagactatctttctagggttaaaaaagatttgcgctttactcgacctaaactttaaacacgtcatagaatcttcgtttgacaaaaaccacattgtggccaagctgtgtgacgcgacgcgcgctaaagaatggcaaaccaagtcgcgcgagcgtcgactctagaggatccccgggtaccgagctcgaattcgtaatcatggtcatagctgtttcctgtgtgaaattgttatccgctcacaattccacacaacatacgagccggaagcataaagtgtaaagcctggggtgcctaatgagtgagctaactcacattaattgcgttgcgctcactgcccgctttccagtcgggaaacctgtcgtgccagctgcattaatgaatcggccaacgcgcggggagaggcggtttgcgtattgggcgctcttccgcttcctcgctcactgactcgctgcgctcggtcgttcggctgcggcgagcggtatcagctcactcaaaggcggtaatacggt

SEQ ID NO: 35 - DNA, 10398 bp, Artificial Sequence
  pBac-U6(AAEL017774)-gRNA=In#1-LongScaffold-3_UTR-U6(AAEL017763)-g RNA=In#2-LongScaffold-3_UTR-3xp3-tdTomato-v3
tatccacagaatcaggggataacgcaggaaagaacatgtgagcaaaaggccagcaaaaggccaggaaccgtaaaaaggccgcgttgctggcgtttttccataggctccgcccccctgacgagcatcacaaaaatcgacgctcaagtcagaggtggcgaaacccgacaggactataaagataccaggcgtttccccctggaagctccctcgtgcgctctcctgttccgaccctgccgcttaccggatacctgtccgcctttctcccttcgggaagcgtggcgctttctcaatgctcacgctgtaggtatctcagttcggtgtaggtcgttcgctccaagctgggctgtgtgcacgaaccccccgttcagcccgaccgctgcgccttatccggtaactatcgtcttgagtccaacccggtaagacacgacttatcgccactggcagcagccactggtaacaggattagcagagcgaggtatgtaggcggtgctacagagttcttgaagtggtggcctaactacggctacactagaaggacagtatttggtatctgcgctctgctgaagccagttaccttcggaaaaagagttggtagctcttgatccggcaaacaaaccaccgctggtagcggtggtttttttgtttgcaagcagcagattacgcgcagaaaaaaaggatctcaagaagatcctttgatcttttctacggggtctgacgctcagtggaacgaaaactcacgttaagggattttggtcatgagattatcaaaaaggatcttcacctagatccttttaaattaaaaatgaagttttaaatcaatctaaagtatatatgagtaaacttggtctgacagttaccaatgcttaatcagtgaggcacctatctcagcgatctgtctatttcgttcatccatagttgcctgactccccgtcgtgtagataactacgatacgggagggcttaccatctggccccagtgctgcaatgataccgcgagacccacgctcaccggctccagatttatcagcaataaaccagccagccggaagggccgagcgcagaagtggtcctgcaactttatccgcctccatccagtctattaattgttgccgggaagctagagtaagtagttcgccagttaatagtttgcgcaacgttgttgccattgctacaggcatcgtggtgtcacgctcgtcgtttggtatggcttcattcagctccggttcccaacgatcaaggcgagttacatgatcccccatgttgtgcaaaaaagcggttagctccttcggtcctccgatcgttgtcagaagtaagttggccgcagtgttatcactcatggttatggcagcactgcataattctcttactgtcatgccatccgtaagatgcttttctgtgactggtgagtactcaaccaagtcattctgagaatagtgtatgcggcgaccgagttgctcttgcccggcgtcaatacgggataataccgcgccacatagcagaactttaaaagtgctcatcattggaaaacgttcttcggggcgaaaactctcaaggatcttaccgctgttgagatccagttcgatgtaacccactcgtgcacccaactgatcttcagcatcttttactttcaccagcgtttctgggtgagcaaaaacaggaaggcaaaatgccgcaaaaaagggaataagggcgacacggaaatgttgaatactcatactcttcctttttcaatattattgaagcatttatcagggttattgtctcatgagcggatacatatttgaatgtatttagaaaaataaacaaataggggttccgcgcacatttccccgaaaagtgccacctgacgtctaagaaaccattattatcatgacattaacctataaaaataggcgtatcacgaggccctttcgtctcgcgcgtttcggtgatgacggtgaaaacctctgacacatgcagctcccggagacggtcacagcttgtctgtaagcggatgccgggagcagacaagcccgtcagggcgcgtcagcgggtgttggcgggtgtcggggctggcttaactatgcggcatcagagcagattgtactgagagtgcaccatatgcggtgtgaaataccgcacagatgcgtaaggagaaaataccgcatcaggcgccattcgccattcaggctgcgcaactgttgggaagggcgatcggtgcgggcctcttcgctattacgccagctggcgaaagggggatgtgctgcaaggcgattaagttgggtaacgccagggttttcccagtcacgacgttgtaaaacgacggccagtgccaagctttgtttaaaatataacaaaattgtgatcccacaaaatgaagtggggcaaaatcaaataattaactagtgtccgtaaacttgttggtcttcaactttttgaggaacacgttggacggcaaatcgtgactataacacaagttgatttaataattttagccaacacgtcgggctgcgtgttttttgcgctctgtgtacacgttgattaactggtcgattaaataatttaatttttggttcttctttaaatctgtgatgaaattttttaaaataactttaaattcttcattggtaaaaaatgccacgttttgcaacttgtgagggtctaatatgaggtcaaactcagtaggagttttatccaaaaaagaaaacatgattacgtctgtacacgaacgcgtattaacgcagagtgcaaagtataagagggttaaaaaatatattttacgcaccatatacgcatcgggttgatatcgttaatatggatcaatttgaacagttgattaacgtgtctctgctcaagtctttgatcaaaacgcaaatcgacgaaaatgtgtcggacaatatcaagtcgatgagcgaaaaactaaaaaggctagaatacgacaatctcacagacagcgttgagatatacggtattcacgacagcaggctgaataataaaaaaattagaaactattatttaaccctagaaagataatcatattgtgacgtacgttaaagataatcatgcgtaaaattgacgcatgtgttttatcggtctgtatatcgaggtttatttattaatttgaatagatattaagttttattatatttacacttacatactaataataaattcaacaaacaatttatttatgtttatttatttattaaaaaaaaacaaaaactcaaaatttcttctataaagtaacaaaacttttaaacattctctcttttacaaaaataaacttattttgtactttaaaaacagtcatgttgtattataaaataagtaattagcttaacttatacataatagaaacaaattatacttattagtcagtcagaaacaactttggcacatatcaatattatgctctcgacaaataacttttttgcattttttgcacgatgcatttgcctttcgccttattttagaggggcagtaagtacagtaagtacgttttttcattactggctcttcagtactgtcatctgatgtaccaggcacttcatttggcaaaatattagagatattatcgcgcaaatatctcttcaaagtaggagcttctaaacgcttacgcataaacgatgacgtcaggctcatgtaaaggtttctcataaattttttgcgactttgaaccttttctcccttgctactgacattatggctgtatataataaaagaatttatgcaggcaatgtttatcattccgtacaataatgccataggccacctattcgtcttcctactgcaggtcatcacagaacacatttggtctagcgtgtccactccgcctttagtttgattataatacataaccatttgcggtttaccggtactttcgttgatagaagcatcctcatcacaagatgataataagtataccatcttagctggcttcggtttatatgagacgagagtaaggggtccgtcaaaacaaaacatcgatgttcccactggcctggagcgactgtttttcagtacttccggtatctcgcgtttgtttgatcgcacggttcccacaatggttaattcgagctcgcccgggctcctaggagatcttcatcacaaacgaaactattataatcgtcttcaggggaacggtagcatcatatctgtcaccagtcagtcggattcctttctttcggcataaattatgctcgggtgacgagacgagttgaaaatcccgtaaattaaaacatataccacactcgccgtcctagacgacgacgacgacgacgattcccaaggaattgaacccttcatttgcatttcactaccgctctgagagatgcaaagcgcgccagacagtcgatcgaatctgcagaccagagagtcacatcaagaatgttgacattccaccagaagactctaattattcttcgctcgactgggaaaactgttaacaactgctcgagtgtggtcggagcggctcacagtgcgttttcccgtagacaaaaatcaaatttcatggtatttttcggcgataaacagtaagttaaagggaacccgaatttagtgctatataatttaattccactagagtttgtatcctttgatagatacgcgtatttcgacctcaactgcaaggccgtcgtgtactagacttgactaatccagactggtcttttagttatgacttctgtccacatctccatacattcaacgcactgtgcggctgtgctgtgcgactccgtcgagtcgaccaacatagttgaaacaaattgaatatttaattgatcgttataggaatggtgttagatgagtcatcctttacagtaagcacatacagtattataattgaagatcgtcggcagataggtgtgtagggtagagtatcagcaataagttgggacgtttgactttttgtaggtagacaaaaactaaactttttttcgcttctctatgtgtgcccctgggtagcgttccgttccgattggggtgcgaacgaatgaaatcgcccatcgagttgatacgtccatccatcgctagaaccgcgttcgctgtagaagactatataagagcagaggcaagagtagtgaaatgcgggattcgctctcgacgagtcttagagctatgctggaaacagcatagcaagttaagataaggctagtccgttatcaacttgaaaaagtggcaccgagtcggtgctttttttggtggttgttcatcgattcctaatattgcagtgaagcagtttgttgtgcatggcgaagataaggttagggcgaggaatgccttggaaataagcggcactgggccgtatgaataaaaagcgttgaactttactacatgtagcatctactcaaaaacaaaatccacaaagtttactacacttttggtatgaataaaaaccttttcgaacatgtagtacctactactttaagaaaattctattcaaagtacagagtaatgctgcatgttaagaaaattccattcagagtgactcttgaaatcaataaaatcatgcatatatgccaaatttgtcacttattcacgtgacaaattatgtgaaaatatgaatattactacattcccgctatgcatcgcgtaatcgatcatgaaatttatgttggttatgtaactttacagtattccctttatgtgcatgtgaattttataatgatttgacaacaaggattttccttagaattttcgaattttagctagaaatctgtatcctatgaatgaatcttgagataacagcaattgtaacattataaagttcctaacattttcaagattccagtattgagtcgcgatcgcttaattaaccgcggatatgtcttgccgaagcacattaacccaagccatttatatatcaagtacaagttgatttgattctagtgatggactgacacgaatctatggcactgttgcagagcttacaaacaggtacccggagtcgcttcaattattcaatcatccattcaaaaacttccatctcttccaattagccaatattcaaattggaatccagccagccgacggaggcagatggtctacctggcaactatagagtttccatgtttccagactttccctcccggtaaacggagacaaaacgacagacgtaagtaggtacatatgcataccgcacggacaaatcaaatttgtctggcagctccaattagagtcgttaaaaatttaacgatgcgctaaataacttcaagctatttgtctcgctggattggcttcgagtggtaagatcctatcaaatgccgaaaacaaaaaactttcttcttaattgttcgttcttcaacacctctccatggtgataacggatacggtttcattgtcagcatccatcctccgaaaaatacattacgccttgaaatatgcaatcgcaaacacggatctgtttggaacatttattttactatgaagagatgcgataggtaatatttatttgagcgtttaagatactcattgttctctcaaagaatgtcattgaaagccaacgaggtcaaatcaaatattataataaaaaggtcaaagaggactaacttaaagctctctttatggataggaaaaaatattttcgcccatcgctagaacttttaccgtttccattgagtatataactaagatgaatgaggctaattgatggacaacatttccaaggttagtcttagagctatgctggaaacagcatagcaagttaagataaggctagtccgttatcaacttgaaaaagtggcaccgagtcggtgctttttttaagatgcttcggcaattaataataaggaatggtaaagcattcttcaaatgttactatgttctcaaattttcaagaattaggtattcaagaaattctttcaggcatattccataatctgcacaagcagctactttagaaattattgccgggcttaaattatatgtacaacatttcctgagtattttctgacaaaaattctcacaagggaaggtcacgatggagttacacggggtttttaaccggactatttttgttagattctacatgtcgaaatatgaaaaaccccaaagcctttcgggtgatggaccagtggtgtagccaggaggggctctgaaaggggtaattttgtacgtatattatattattaagctaattggaaatttgacaaaaatatttttttagtatttattgtgatggtagagaacaaaattgacattaatgtacgtttgaaatgtatttgccatgcctttggcgtactaacatggagtatggacaccaaaaccgatttcggccttttgggcccggcgcgccaattcgagctcgcccggggatctaattcaattagagactaattcaattagagctaattcaattaggatccaagcttatcgatttcgaaccctcgaccgccggagtataaatagaggcgcttcgtctacggagcgacaattcaattcaaacaagcaaagtgaacacgtcgctaagcgaaagctaagcaaataaacaagcgcagctgaacaagctaaacaatcggggtaccgctagagtcgacggtacgatccaccggtcgccaccatggtgagcaagggcgaggaggtcatcaaagagttcatgcgcttcaaggtgcgcatggagggctccatgaacggccacgagttcgagatcgagggcgagggcgagggccgcccctacgagggcacccagaccgccaagctgaaggtgaccaagggcggccccctgcccttcgcctgggacatcctgtccccccagttcatgtacggctccaaggcgtacgtgaagcaccccgccgacatccccgattacaagaagctgtccttccccgagggcttcaagtgggagcgcgtgatgaacttcgaggacggcggtctggtgaccgtgacccaggactcctccctgcaggacggcacgctgatctacaaggtgaagatgcgcggcaccaacttcccccccgacggccccgtaatgcagaagaagaccatgggctgggaggcctccaccgagcgcctgtacccccgcgacggcgtgctgaagggcgagatccaccaggccctgaagctgaaggacggcggccactacctggtggagttcaagaccatctacatggccaagaagcccgtgcaactgcccggctactactacgtggacaccaagctggacatcacctcccacaacgaggactacaccatcgtggaacagtacgagcgctccgagggccgccaccacctgttcctggggcatggcaccggcagcaccggcagcggcagctccggcaccgcctcctccgaggacaacaacatggccgttatcaaggaatttatgcgcttcaaagttaggatggagggatccatgaacggacatgagttcgagatcgagggagagggcgagggacgcccgtatgaaggcacacaaacagccaaactcaaggtcaccaagggcggaccactgcccttcgcctgggatatcctgagtccccagtttatgtacggcagcaaggcctacgttaagcaccccgctgacataccggactacaaaaagctgtcctttccggaaggcttcaagtgggagcgcgtgatgaatttcgaagacggaggactggtcactgtgacccaagatagcagtttgcaggacggtacactgatctataaggttaaaatgcgcggcactaactttccgccagatggcccagtgatgcagaagaagaccatgggttgggaggcatccaccgaacgtctgtaccctcgagacggagtgctcaagggcgagatccatcaggccctcaaactgaaagatggtggtcactacctggtcgaatttaagaccatttacatggccaagaagccggttcagctgcccggatattattatgtggatacgaaactggatataacttcgcataacgaagactacaccattgtcgagcagtatgagcgcagcgaaggccgacatcacctgttcctctacggcatggacgagctgtacaagtaggcggccgcgactctagatcataatcagccataccacatttgtagaggttttacttgctttaaaaaacctcccacacctccccctgaacctgaaacataaaatgaatgcaattgttgttgttaacttgtttattgcagcttataatggttacaaataaagcaatagcatcacaaatttcacaaataaagcatttttttcactgcattctagttgtggtttgtccaaactcatcaatgtatcttaaagcttctaggccggccgatctcggatctgacaatgttcagtgcagagactcggctacgcctcgtggactttgaagttgaccaacaatgtttattcttacctctaatagtcctctgtggcaaggtcaagattctgttagaagccaatgaagaacctggttgttcaataacattttgttcgtctaatatttcactaccgcttgacgttggctgcacttcatgtacctcatctataaacgcttcttctgtatcgctctggacgtcatcttcacttacgtgatctgatatttcactgtcagaatcctcaccaacaagctcgtcatcgctttgcagaagagcagagaggatatgctcatcgtctaaagaactacccattttattatatattagtcacgatatctataacaagaaaatatatatataataagttatcacgtaagtagaacatgaaataacaatataattatcgtatgagttaaatcttaaaagtcacgtaaaagataatcatgcgtcattttgactcacgcggtcgttatagttcaaaatcagtgacacttaccgcattgacaagcacgcctcacgggagctccaagcggcgactgagatgtcctaaatgcacagcgacggattcgcgctatttagaaagagagagcaatatttcaagaatgcatgcgtcaattttacgcagactatctttctagggttaaaaaagatttgcgctttactcgacctaaactttaaacacgtcatagaatcttcgtttgacaaaaaccacattgtggccaagctgtgtgacgcgacgcgcgctaaagaatggcaaaccaagtcgcgcgagcgtcgactctagaggatccccgggtaccgagctcgaattcgtaatcatggtcatagctgtttcctgtgtgaaattgttatccgctcacaattccacacaacatacgagccggaagcataaagtgtaaagcctggggtgcctaatgagtgagctaactcacattaattgcgttgcgctcactgcccgctttccagtcgggaaacctgtcgtgccagctgcattaatgaatcggccaacgcgcggggagaggcggtttgcgtattgggcgctcttccgcttcctcgctcactgactcgctgcgctcggtcgttcggctgcggcgagcggtatcagctcactcaaaggcggtaatacggt

SEQ ID NO: 36 - DNA, 10398 bp, Artificial Sequence
  pBac-U6(AAEL017774)-sgLab5-U6(AAEL017763)-sgLab4-LongScaffold-3_U TR-3xp3-tdTomato
tatccacagaatcaggggataacgcaggaaagaacatgtgagcaaaaggccagcaaaaggccaggaaccgtaaaaaggccgcgttgctggcgtttttccataggctccgcccccctgacgagcatcacaaaaatcgacgctcaagtcagaggtggcgaaacccgacaggactataaagataccaggcgtttccccctggaagctccctcgtgcgctctcctgttccgaccctgccgcttaccggatacctgtccgcctttctcccttcgggaagcgtggcgctttctcaatgctcacgctgtaggtatctcagttcggtgtaggtcgttcgctccaagctgggctgtgtgcacgaaccccccgttcagcccgaccgctgcgccttatccggtaactatcgtcttgagtccaacccggtaagacacgacttatcgccactggcagcagccactggtaacaggattagcagagcgaggtatgtaggcggtgctacagagttcttgaagtggtggcctaactacggctacactagaaggacagtatttggtatctgcgctctgctgaagccagttaccttcggaaaaagagttggtagctcttgatccggcaaacaaaccaccgctggtagcggtggtttttttgtttgcaagcagcagattacgcgcagaaaaaaaggatctcaagaagatcctttgatcttttctacggggtctgacgctcagtggaacgaaaactcacgttaagggattttggtcatgagattatcaaaaaggatcttcacctagatccttttaaattaaaaatgaagttttaaatcaatctaaagtatatatgagtaaacttggtctgacagttaccaatgcttaatcagtgaggcacctatctcagcgatctgtctatttcgttcatccatagttgcctgactccccgtcgtgtagataactacgatacgggagggcttaccatctggccccagtgctgcaatgataccgcgagacccacgctcaccggctccagatttatcagcaataaaccagccagccggaagggccgagcgcagaagtggtcctgcaactttatccgcctccatccagtctattaattgttgccgggaagctagagtaagtagttcgccagttaatagtttgcgcaacgttgttgccattgctacaggcatcgtggtgtcacgctcgtcgtttggtatggcttcattcagctccggttcccaacgatcaaggcgagttacatgatcccccatgttgtgcaaaaaagcggttagctccttcggtcctccgatcgttgtcagaagtaagttggccgcagtgttatcactcatggttatggcagcactgcataattctcttactgtcatgccatccgtaagatgcttttctgtgactggtgagtactcaaccaagtcattctgagaatagtgtatgcggcgaccgagttgctcttgcccggcgtcaatacgggataataccgcgccacatagcagaactttaaaagtgctcatcattggaaaacgttcttcggggcgaaaactctcaaggatcttaccgctgttgagatccagttcgatgtaacccactcgtgcacccaactgatcttcagcatcttttactttcaccagcgtttctgggtgagcaaaaacaggaaggcaaaatgccgcaaaaaagggaataagggcgacacggaaatgttgaatactcatactcttcctttttcaatattattgaagcatttatcagggttattgtctcatgagcggatacatatttgaatgtatttagaaaaataaacaaataggggttccgcgcacatttccccgaaaagtgccacctgacgtctaagaaaccattattatcatgacattaacctataaaaataggcgtatcacgaggccctttcgtctcgcgcgtttcggtgatgacggtgaaaacctctgacacatgcagctcccggagacggtcacagcttgtctgtaagcggatgccgggagcagacaagcccgtcagggcgcgtcagcgggtgttggcgggtgtcggggctggcttaactatgcggcatcagagcagattgtactgagagtgcaccatatgcggtgtgaaataccgcacagatgcgtaaggagaaaataccgcatcaggcgccattcgccattcaggctgcgcaactgttgggaagggcgatcggtgcgggcctcttcgctattacgccagctggcgaaagggggatgtgctgcaaggcgattaagttgggtaacgccagggttttcccagtcacgacgttgtaaaacgacggccagtgccaagctttgtttaaaatataacaaaattgtgatcccacaaaatgaagtggggcaaaatcaaataattaactagtgtccgtaaacttgttggtcttcaactttttgaggaacacgttggacggcaaatcgtgactataacacaagttgatttaataattttagccaacacgtcgggctgcgtgttttttgcgctctgtgtacacgttgattaactggtcgattaaataatttaatttttggttcttctttaaatctgtgatgaaattttttaaaataactttaaattcttcattggtaaaaaatgccacgttttgcaacttgtgagggtctaatatgaggtcaaactcagtaggagttttatccaaaaaagaaaacatgattacgtctgtacacgaacgcgtattaacgcagagtgcaaagtataagagggttaaaaaatatattttacgcaccatatacgcatcgggttgatatcgttaatatggatcaatttgaacagttgattaacgtgtctctgctcaagtctttgatcaaaacgcaaatcgacgaaaatgtgtcggacaatatcaagtcgatgagcgaaaaactaaaaaggctagaatacgacaatctcacagacagcgttgagatatacggtattcacgacagcaggctgaataataaaaaaattagaaactattatttaaccctagaaagataatcatattgtgacgtacgttaaagataatcatgcgtaaaattgacgcatgtgttttatcggtctgtatatcgaggtttatttattaatttgaatagatattaagttttattatatttacacttacatactaataataaattcaacaaacaatttatttatgtttatttatttattaaaaaaaaacaaaaactcaaaatttcttctataaagtaacaaaacttttaaacattctctcttttacaaaaataaacttattttgtactttaaaaacagtcatgttgtattataaaataagtaattagcttaacttatacataatagaaacaaattatacttattagtcagtcagaaacaactttggcacatatcaatattatgctctcgacaaataacttttttgcattttttgcacgatgcatttgcctttcgccttattttagaggggcagtaagtacagtaagtacgttttttcattactggctcttcagtactgtcatctgatgtaccaggcacttcatttggcaaaatattagagatattatcgcgcaaatatctcttcaaagtaggagcttctaaacgcttacgcataaacgatgacgtcaggctcatgtaaaggtttctcataaattttttgcgactttgaaccttttctcccttgctactgacattatggctgtatataataaaagaatttatgcaggcaatgtttatcattccgtacaataatgccataggccacctattcgtcttcctactgcaggtcatcacagaacacatttggtctagcgtgtccactccgcctttagtttgattataatacataaccatttgcggtttaccggtactttcgttgatagaagcatcctcatcacaagatgataataagtataccatcttagctggcttcggtttatatgagacgagagtaaggggtccgtcaaaacaaaacatcgatgttcccactggcctggagcgactgtttttcagtacttccggtatctcgcgtttgtttgatcgcacggttcccacaatggttaattcgagctcgcccgggctcctaggagatcttcatcacaaacgaaactattataatcgtcttcaggggaacggtagcatcatatctgtcaccagtcagtcggattcctttctttcggcataaattatgctcgggtgacgagacgagttgaaaatcccgtaaattaaaacatataccacactcgccgtcctagacgacgacgacgacgacgattcccaaggaattgaacccttcatttgcatttcactaccgctctgagagatgcaaagcgcgccagacagtcgatcgaatctgcagaccagagagtcacatcaagaatgttgacattccaccagaagactctaattattcttcgctcgactgggaaaactgttaacaactgctcgagtgtggtcggagcggctcacagtgcgttttcccgtagacaaaaatcaaatttcatggtatttttcggcgataaacagtaagttaaagggaacccgaatttagtgctatataatttaattccactagagtttgtatcctttgatagatacgcgtatttcgacctcaactgcaaggccgtcgtgtactagacttgactaatccagactggtcttttagttatgacttctgtccacatctccatacattcaacgcactgtgcggctgtgctgtgcgactccgtcgagtcgaccaacatagttgaaacaaattgaatatttaattgatcgttataggaatggtgttagatgagtcatcctttacagtaagcacatacagtattataattgaagatcgtcggcagataggtgtgtagggtagagtatcagcaataagttgggacgtttgactttttgtaggtagacaaaaactaaactttttttcgcttctctatgtgtgcccctgggtagcgttccgttccgattggggtgcgaacgaatgaaatcgcccatcgagttgatacgtccatccatcgctagaaccgcgttcgctgtagaagactatataagagcagaggcaagagtagtgaaatgcactagtgggatatcctgagtcttagagctatgctggaaacagcatagcaagttaagataaggctagtccgttatcaacttgaaaaagtggcaccgagtcggtgctttttttggtggttgttcatcgattcctaatattgcagtgaagcagtttgttgtgcatggcgaagataaggttagggcgaggaatgccttggaaataagcggcactgggccgtatgaataaaaagcgttgaactttactacatgtagcatctactcaaaaacaaaatccacaaagtttactacacttttggtatgaataaaaaccttttcgaacatgtagtacctactactttaagaaaattctattcaaagtacagagtaatgctgcatgttaagaaaattccattcagagtgactcttgaaatcaataaaatcatgcatatatgccaaatttgtcacttattcacgtgacaaattatgtgaaaatatgaatattactacattcccgctatgcatcgcgtaatcgatcatgaaatttatgttggttatgtaactttacagtattccctttatgtgcatgtgaattttataatgatttgacaacaaggattttccttagaattttcgaattttagctagaaatctgtatcctatgaatgaatcttgagataacagcaattgtaacattataaagttcctaacattttcaagattccagtattgagtcgcgatcgcttaattaaccgcggatatgtcttgccgaagcacattaacccaagccatttatatatcaagtacaagttgatttgattctagtgatggactgacacgaatctatggcactgttgcagagcttacaaacaggtacccggagtcgcttcaattattcaatcatccattcaaaaacttccatctcttccaattagccaatattcaaattggaatccagccagccgacggaggcagatggtctacctggcaactatagagtttccatgtttccagactttccctcccggtaaacggagacaaaacgacagacgtaagtaggtacatatgcataccgcacggacaaatcaaatttgtctggcagctccaattagagtcgttaaaaatttaacgatgcgctaaataacttcaagctatttgtctcgctggattggcttcgagtggtaagatcctatcaaatgccgaaaacaaaaaactttcttcttaattgttcgttcttcaacacctctccatggtgataacggatacggtttcattgtcagcatccatcctccgaaaaatacattacgccttgaaatatgcaatcgcaaacacggatctgtttggaacatttattttactatgaagagatgcgataggtaatatttatttgagcgtttaagatactcattgttctctcaaagaatgtcattgaaagccaacgaggtcaaatcaaatattataataaaaaggtcaaagaggactaacttaaagctctctttatggataggaaaaaatattttcgcccatcgctagaacttttaccgtttccattgagtatataactaagatgaatgaggctaattgatgtccaggaagcatttggtatgtcttagagctatgctggaaacagcatagcaagttaagataaggctagtccgttatcaacttgaaaaagtggcaccgagtcggtgctttttttaagatgcttcggcaattaataataaggaatggtaaagcattcttcaaatgttactatgttctcaaattttcaagaattaggtattcaagaaattctttcaggcatattccataatctgcacaagcagctactttagaaattattgccgggcttaaattatatgtacaacatttcctgagtattttctgacaaaaattctcacaagggaaggtcacgatggagttacacggggtttttaaccggactatttttgttagattctacatgtcgaaatatgaaaaaccccaaagcctttcgggtgatggaccagtggtgtagccaggaggggctctgaaaggggtaattttgtacgtatattatattattaagctaattggaaatttgacaaaaatatttttttagtatttattgtgatggtagagaacaaaattgacattaatgtacgtttgaaatgtatttgccatgcctttggcgtactaacatggagtatggacaccaaaaccgatttcggccttttgggcccggcgcgccaattcgagctcgcccggggatctaattcaattagagactaattcaattagagctaattcaattaggatccaagcttatcgatttcgaaccctcgaccgccggagtataaatagaggcgcttcgtctacggagcgacaattcaattcaaacaagcaaagtgaacacgtcgctaagcgaaagctaagcaaataaacaagcgcagctgaacaagctaaacaatcggggtaccgctagagtcgacggtacgatccaccggtcgccaccatggtgagcaagggcgaggaggtcatcaaagagttcatgcgcttcaaggtgcgcatggagggctccatgaacggccacgagttcgagatcgagggcgagggcgagggccgcccctacgagggcacccagaccgccaagctgaaggtgaccaagggcggccccctgcccttcgcctgggacatcctgtccccccagttcatgtacggctccaaggcgtacgtgaagcaccccgccgacatccccgattacaagaagctgtccttccccgagggcttcaagtgggagcgcgtgatgaacttcgaggacggcggtctggtgaccgtgacccaggactcctccctgcaggacggcacgctgatctacaaggtgaagatgcgcggcaccaacttcccccccgacggccccgtaatgcagaagaagaccatgggctgggaggcctccaccgagcgcctgtacccccgcgacggcgtgctgaagggcgagatccaccaggccctgaagctgaaggacggcggccactacctggtggagttcaagaccatctacatggccaagaagcccgtgcaactgcccggctactactacgtggacaccaagctggacatcacctcccacaacgaggactacaccatcgtggaacagtacgagcgctccgagggccgccaccacctgttcctggggcatggcaccggcagcaccggcagcggcagctccggcaccgcctcctccgaggacaacaacatggccgttatcaaggaatttatgcgcttcaaagttaggatggagggatccatgaacggacatgagttcgagatcgagggagagggcgagggacgcccgtatgaaggcacacaaacagccaaactcaaggtcaccaagggcggaccactgcccttcgcctgggatatcctgagtccccagtttatgtacggcagcaaggcctacgttaagcaccccgctgacataccggactacaaaaagctgtcctttccggaaggcttcaagtgggagcgcgtgatgaatttcgaagacggaggactggtcactgtgacccaagatagcagtttgcaggacggtacactgatctataaggttaaaatgcgcggcactaactttccgccagatggcccagtgatgcagaagaagaccatgggttgggaggcatccaccgaacgtctgtaccctcgagacggagtgctcaagggcgagatccatcaggccctcaaactgaaagatggtggtcactacctggtcgaatttaagaccatttacatggccaagaagccggttcagctgcccggatattattatgtggatacgaaactggatataacttcgcataacgaagactacaccattgtcgagcagtatgagcgcagcgaaggccgacatcacctgttcctctacggcatggacgagctgtacaagtaggcggccgcgactctagatcataatcagccataccacatttgtagaggttttacttgctttaaaaaacctcccacacctccccctgaacctgaaacataaaatgaatgcaattgttgttgttaacttgtttattgcagcttataatggttacaaataaagcaatagcatcacaaatttcacaaataaagcatttttttcactgcattctagttgtggtttgtccaaactcatcaatgtatcttaaagcttctaggccggccgatctcggatctgacaatgttcagtgcagagactcggctacgcctcgtggactttgaagttgaccaacaatgtttattcttacctctaatagtcctctgtggcaaggtcaagattctgttagaagccaatgaagaacctggttgttcaataacattttgttcgtctaatatttcactaccgcttgacgttggctgcacttcatgtacctcatctataaacgcttcttctgtatcgctctggacgtcatcttcacttacgtgatctgatatttcactgtcagaatcctcaccaacaagctcgtcatcgctttgcagaagagcagagaggatatgctcatcgtctaaagaactacccattttattatatattagtcacgatatctataacaagaaaatatatatataataagttatcacgtaagtagaacatgaaataacaatataattatcgtatgagttaaatcttaaaagtcacgtaaaagataatcatgcgtcattttgactcacgcggtcgttatagttcaaaatcagtgacacttaccgcattgacaagcacgcctcacgggagctccaagcggcgactgagatgtcctaaatgcacagcgacggattcgcgctatttagaaagagagagcaatatttcaagaatgcatgcgtcaattttacgcagactatctttctagggttaaaaaagatttgcgctttactcgacctaaactttaaacacgtcatagaatcttcgtttgacaaaaaccacattgtggccaagctgtgtgacgcgacgcgcgctaaagaatggcaaaccaagtcgcgcgagcgtcgactctagaggatccccgggtaccgagctcgaattcgtaatcatggtcatagctgtttcctgtgtgaaattgttatccgctcacaattccacacaacatacgagccggaagcataaagtgtaaagcctggggtgcctaatgagtgagctaactcacattaattgcgttgcgctcactgcccgctttccagtcgggaaacctgtcgtgccagctgcattaatgaatcggccaacgcgcggggagaggcggtttgcgtattgggcgctcttccgcttcctcgctcactgactcgctgcgctcggtcgttcggctgcggcgagcggtatcagctcactcaaaggcggtaatacggt

SEQ ID NO: 37 - DNA, 10398 bp, Artificial Sequence
  pBac-U6(AAEL017774)-sgSlx4-U6(AAEL017763)-sgSlx5-LongScaffold-3_U TR-3xp3-tdTomato
tatccacagaatcaggggataacgcaggaaagaacatgtgagcaaaaggccagcaaaaggccaggaaccgtaaaaaggccgcgttgctggcgtttttccataggctccgcccccctgacgagcatcacaaaaatcgacgctcaagtcagaggtggcgaaacccgacaggactataaagataccaggcgtttccccctggaagctccctcgtgcgctctcctgttccgaccctgccgcttaccggatacctgtccgcctttctcccttcgggaagcgtggcgctttctcaatgctcacgctgtaggtatctcagttcggtgtaggtcgttcgctccaagctgggctgtgtgcacgaaccccccgttcagcccgaccgctgcgccttatccggtaactatcgtcttgagtccaacccggtaagacacgacttatcgccactggcagcagccactggtaacaggattagcagagcgaggtatgtaggcggtgctacagagttcttgaagtggtggcctaactacggctacactagaaggacagtatttggtatctgcgctctgctgaagccagttaccttcggaaaaagagttggtagctcttgatccggcaaacaaaccaccgctggtagcggtggtttttttgtttgcaagcagcagattacgcgcagaaaaaaaggatctcaagaagatcctttgatcttttctacggggtctgacgctcagtggaacgaaaactcacgttaagggattttggtcatgagattatcaaaaaggatcttcacctagatccttttaaattaaaaatgaagttttaaatcaatctaaagtatatatgagtaaacttggtctgacagttaccaatgcttaatcagtgaggcacctatctcagcgatctgtctatttcgttcatccatagttgcctgactccccgtcgtgtagataactacgatacgggagggcttaccatctggccccagtgctgcaatgataccgcgagacccacgctcaccggctccagatttatcagcaataaaccagccagccggaagggccgagcgcagaagtggtcctgcaactttatccgcctccatccagtctattaattgttgccgggaagctagagtaagtagttcgccagttaatagtttgcgcaacgttgttgccattgctacaggcatcgtggtgtcacgctcgtcgtttggtatggcttcattcagctccggttcccaacgatcaaggcgagttacatgatcccccatgttgtgcaaaaaagcggttagctccttcggtcctccgatcgttgtcagaagtaagttggccgcagtgttatcactcatggttatggcagcactgcataattctcttactgtcatgccatccgtaagatgcttttctgtgactggtgagtactcaaccaagtcattctgagaatagtgtatgcggcgaccgagttgctcttgcccggcgtcaatacgggataataccgcgccacatagcagaactttaaaagtgctcatcattggaaaacgttcttcggggcgaaaactctcaaggatcttaccgctgttgagatccagttcgatgtaacccactcgtgcacccaactgatcttcagcatcttttactttcaccagcgtttctgggtgagcaaaaacaggaaggcaaaatgccgcaaaaaagggaataagggcgacacggaaatgttgaatactcatactcttcctttttcaatattattgaagcatttatcagggttattgtctcatgagcggatacatatttgaatgtatttagaaaaataaacaaataggggttccgcgcacatttccccgaaaagtgccacctgacgtctaagaaaccattattatcatgacattaacctataaaaataggcgtatcacgaggccctttcgtctcgcgcgtttcggtgatgacggtgaaaacctctgacacatgcagctcccggagacggtcacagcttgtctgtaagcggatgccgggagcagacaagcccgtcagggcgcgtcagcgggtgttggcgggtgtcggggctggcttaactatgcggcatcagagcagattgtactgagagtgcaccatatgcggtgtgaaataccgcacagatgcgtaaggagaaaataccgcatcaggcgccattcgccattcaggctgcgcaactgttgggaagggcgatcggtgcgggcctcttcgctattacgccagctggcgaaagggggatgtgctgcaaggcgattaagttgggtaacgccagggttttcccagtcacgacgttgtaaaacgacggccagtgccaagctttgtttaaaatataacaaaattgtgatcccacaaaatgaagtggggcaaaatcaaataattaactagtgtccgtaaacttgttggtcttcaactttttgaggaacacgttggacggcaaatcgtgactataacacaagttgatttaataattttagccaacacgtcgggctgcgtgttttttgcgctctgtgtacacgttgattaactggtcgattaaataatttaatttttggttcttctttaaatctgtgatgaaattttttaaaataactttaaattcttcattggtaaaaaatgccacgttttgcaacttgtgagggtctaatatgaggtcaaactcagtaggagttttatccaaaaaagaaaacatgattacgtctgtacacgaacgcgtattaacgcagagtgcaaagtataagagggttaaaaaatatattttacgcaccatatacgcatcgggttgatatcgttaatatggatcaatttgaacagttgattaacgtgtctctgctcaagtctttgatcaaaacgcaaatcgacgaaaatgtgtcggacaatatcaagtcgatgagcgaaaaactaaaaaggctagaatacgacaatctcacagacagcgttgagatatacggtattcacgacagcaggctgaataataaaaaaattagaaactattatttaaccctagaaagataatcatattgtgacgtacgttaaagataatcatgcgtaaaattgacgcatgtgttttatcggtctgtatatcgaggtttatttattaatttgaatagatattaagttttattatatttacacttacatactaataataaattcaacaaacaatttatttatgtttatttatttattaaaaaaaaacaaaaactcaaaatttcttctataaagtaacaaaacttttaaacattctctcttttacaaaaataaacttattttgtactttaaaaacagtcatgttgtattataaaataagtaattagcttaacttatacataatagaaacaaattatacttattagtcagtcagaaacaactttggcacatatcaatattatgctctcgacaaataacttttttgcattttttgcacgatgcatttgcctttcgccttattttagaggggcagtaagtacagtaagtacgttttttcattactggctcttcagtactgtcatctgatgtaccaggcacttcatttggcaaaatattagagatattatcgcgcaaatatctcttcaaagtaggagcttctaaacgcttacgcataaacgatgacgtcaggctcatgtaaaggtttctcataaattttttgcgactttgaaccttttctcccttgctactgacattatggctgtatataataaaagaatttatgcaggcaatgtttatcattccgtacaataatgccataggccacctattcgtcttcctactgcaggtcatcacagaacacatttggtctagcgtgtccactccgcctttagtttgattataatacataaccatttgcggtttaccggtactttcgttgatagaagcatcctcatcacaagatgataataagtataccatcttagctggcttcggtttatatgagacgagagtaaggggtccgtcaaaacaaaacatcgatgttcccactggcctggagcgactgtttttcagtacttccggtatctcgcgtttgtttgatcgcacggttcccacaatggttaattcgagctcgcccgggctcctaggagatcttcatcacaaacgaaactattataatcgtcttcaggggaacggtagcatcatatctgtcaccagtcagtcggattcctttctttcggcataaattatgctcgggtgacgagacgagttgaaaatcccgtaaattaaaacatataccacactcgccgtcctagacgacgacgacgacgacgattcccaaggaattgaacccttcatttgcatttcactaccgctctgagagatgcaaagcgcgccagacagtcgatcgaatctgcagaccagagagtcacatcaagaatgttgacattccaccagaagactctaattattcttcgctcgactgggaaaactgttaacaactgctcgagtgtggtcggagcggctcacagtgcgttttcccgtagacaaaaatcaaatttcatggtatttttcggcgataaacagtaagttaaagggaacccgaatttagtgctatataatttaattccactagagtttgtatcctttgatagatacgcgtatttcgacctcaactgcaaggccgtcgtgtactagacttgactaatccagactggtcttttagttatgacttctgtccacatctccatacattcaacgcactgtgcggctgtgctgtgcgactccgtcgagtcgaccaacatagttgaaacaaattgaatatttaattgatcgttataggaatggtgttagatgagtcatcctttacagtaagcacatacagtattataattgaagatcgtcggcagataggtgtgtagggtagagtatcagcaataagttgggacgtttgactttttgtaggtagacaaaaactaaactttttttcgcttctctatgtgtgcccctgggtagcgttccgttccgattggggtgcgaacgaatgaaatcgcccatcgagttgatacgtccatccatcgctagaaccgcgttcgctgtagaagactatataagagcagaggcaagagtagtgaaatgtattcgatgttctccaccagtcttagagctatgctggaaacagcatagcaagttaagataaggctagtccgttatcaacttgaaaaagtggcaccgagtcggtgctttttttggtggttgttcatcgattcctaatattgcagtgaagcagtttgttgtgcatggcgaagataaggttagggcgaggaatgccttggaaataagcggcactgggccgtatgaataaaaagcgttgaactttactacatgtagcatctactcaaaaacaaaatccacaaagtttactacacttttggtatgaataaaaaccttttcgaacatgtagtacctactactttaagaaaattctattcaaagtacagagtaatgctgcatgttaagaaaattccattcagagtgactcttgaaatcaataaaatcatgcatatatgccaaatttgtcacttattcacgtgacaaattatgtgaaaatatgaatattactacattcccgctatgcatcgcgtaatcgatcatgaaatttatgttggttatgtaactttacagtattccctttatgtgcatgtgaattttataatgatttgacaacaaggattttccttagaattttcgaattttagctagaaatctgtatcctatgaatgaatcttgagataacagcaattgtaacattataaagttcctaacattttcaagattccagtattgagtcgcgatcgcttaattaaccgcggatatgtcttgccgaagcacattaacccaagccatttatatatcaagtacaagttgatttgattctagtgatggactgacacgaatctatggcactgttgcagagcttacaaacaggtacccggagtcgcttcaattattcaatcatccattcaaaaacttccatctcttccaattagccaatattcaaattggaatccagccagccgacggaggcagatggtctacctggcaactatagagtttccatgtttccagactttccctcccggtaaacggagacaaaacgacagacgtaagtaggtacatatgcataccgcacggacaaatcaaatttgtctggcagctccaattagagtcgttaaaaatttaacgatgcgctaaataacttcaagctatttgtctcgctggattggcttcgagtggtaagatcctatcaaatgccgaaaacaaaaaactttcttcttaattgttcgttcttcaacacctctccatggtgataacggatacggtttcattgtcagcatccatcctccgaaaaatacattacgccttgaaatatgcaatcgcaaacacggatctgtttggaacatttattttactatgaagagatgcgataggtaatatttatttgagcgtttaagatactcattgttctctcaaagaatgtcattgaaagccaacgaggtcaaatcaaatattataataaaaaggtcaaagaggactaacttaaagctctctttatggataggaaaaaatattttcgcccatcgctagaacttttaccgtttccattgagtatataactaagatgaatgaggctaattgatgaaggcatatcaaacattcggtcttagagctatgctggaaacagcatagcaagttaagataaggctagtccgttatcaacttgaaaaagtggcaccgagtcggtgctttttttaagatgcttcggcaattaataataaggaatggtaaagcattcttcaaatgttactatgttctcaaattttcaagaattaggtattcaagaaattctttcaggcatattccataatctgcacaagcagctactttagaaattattgccgggcttaaattatatgtacaacatttcctgagtattttctgacaaaaattctcacaagggaaggtcacgatggagttacacggggtttttaaccggactatttttgttagattctacatgtcgaaatatgaaaaaccccaaagcctttcgggtgatggaccagtggtgtagccaggaggggctctgaaaggggtaattttgtacgtatattatattattaagctaattggaaatttgacaaaaatatttttttagtatttattgtgatggtagagaacaaaattgacattaatgtacgtttgaaatgtatttgccatgcctttggcgtactaacatggagtatggacaccaaaaccgatttcggccttttgggcccggcgcgccaattcgagctcgcccggggatctaattcaattagagactaattcaattagagctaattcaattaggatccaagcttatcgatttcgaaccctcgaccgccggagtataaatagaggcgcttcgtctacggagcgacaattcaattcaaacaagcaaagtgaacacgtcgctaagcgaaagctaagcaaataaacaagcgcagctgaacaagctaaacaatcggggtaccgctagagtcgacggtacgatccaccggtcgccaccatggtgagcaagggcgaggaggtcatcaaagagttcatgcgcttcaaggtgcgcatggagggctccatgaacggccacgagttcgagatcgagggcgagggcgagggccgcccctacgagggcacccagaccgccaagctgaaggtgaccaagggcggccccctgcccttcgcctgggacatcctgtccccccagttcatgtacggctccaaggcgtacgtgaagcaccccgccgacatccccgattacaagaagctgtccttccccgagggcttcaagtgggagcgcgtgatgaacttcgaggacggcggtctggtgaccgtgacccaggactcctccctgcaggacggcacgctgatctacaaggtgaagatgcgcggcaccaacttcccccccgacggccccgtaatgcagaagaagaccatgggctgggaggcctccaccgagcgcctgtacccccgcgacggcgtgctgaagggcgagatccaccaggccctgaagctgaaggacggcggccactacctggtggagttcaagaccatctacatggccaagaagcccgtgcaactgcccggctactactacgtggacaccaagctggacatcacctcccacaacgaggactacaccatcgtggaacagtacgagcgctccgagggccgccaccacctgttcctggggcatggcaccggcagcaccggcagcggcagctccggcaccgcctcctccgaggacaacaacatggccgttatcaaggaatttatgcgcttcaaagttaggatggagggatccatgaacggacatgagttcgagatcgagggagagggcgagggacgcccgtatgaaggcacacaaacagccaaactcaaggtcaccaagggcggaccactgcccttcgcctgggatatcctgagtccccagtttatgtacggcagcaaggcctacgttaagcaccccgctgacataccggactacaaaaagctgtcctttccggaaggcttcaagtgggagcgcgtgatgaatttcgaagacggaggactggtcactgtgacccaagatagcagtttgcaggacggtacactgatctataaggttaaaatgcgcggcactaactttccgccagatggcccagtgatgcagaagaagaccatgggttgggaggcatccaccgaacgtctgtaccctcgagacggagtgctcaagggcgagatccatcaggccctcaaactgaaagatggtggtcactacctggtcgaatttaagaccatttacatggccaagaagccggttcagctgcccggatattattatgtggatacgaaactggatataacttcgcataacgaagactacaccattgtcgagcagtatgagcgcagcgaaggccgacatcacctgttcctctacggcatggacgagctgtacaagtaggcggccgcgactctagatcataatcagccataccacatttgtagaggttttacttgctttaaaaaacctcccacacctccccctgaacctgaaacataaaatgaatgcaattgttgttgttaacttgtttattgcagcttataatggttacaaataaagcaatagcatcacaaatttcacaaataaagcatttttttcactgcattctagttgtggtttgtccaaactcatcaatgtatcttaaagcttctaggccggccgatctcggatctgacaatgttcagtgcagagactcggctacgcctcgtggactttgaagttgaccaacaatgtttattcttacctctaatagtcctctgtggcaaggtcaagattctgttagaagccaatgaagaacctggttgttcaataacattttgttcgtctaatatttcactaccgcttgacgttggctgcacttcatgtacctcatctataaacgcttcttctgtatcgctctggacgtcatcttcacttacgtgatctgatatttcactgtcagaatcctcaccaacaagctcgtcatcgctttgcagaagagcagagaggatatgctcatcgtctaaagaactacccattttattatatattagtcacgatatctataacaagaaaatatatatataataagttatcacgtaagtagaacatgaaataacaatataattatcgtatgagttaaatcttaaaagtcacgtaaaagataatcatgcgtcattttgactcacgcggtcgttatagttcaaaatcagtgacacttaccgcattgacaagcacgcctcacgggagctccaagcggcgactgagatgtcctaaatgcacagcgacggattcgcgctatttagaaagagagagcaatatttcaagaatgcatgcgtcaattttacgcagactatctttctagggttaaaaaagatttgcgctttactcgacctaaactttaaacacgtcatagaatcttcgtttgacaaaaaccacattgtggccaagctgtgtgacgcgacgcgcgctaaagaatggcaaaccaagtcgcgcgagcgtcgactctagaggatccccgggtaccgagctcgaattcgtaatcatggtcatagctgtttcctgtgtgaaattgttatccgctcacaattccacacaacatacgagccggaagcataaagtgtaaagcctggggtgcctaatgagtgagctaactcacattaattgcgttgcgctcactgcccgctttccagtcgggaaacctgtcgtgccagctgcattaatgaatcggccaacgcgcggggagaggcggtttgcgtattgggcgctcttccgcttcctcgctcactgactcgctgcgctcggtcgttcggctgcggcgagcggtatcagctcactcaaaggcggtaatacggt

SEQ ID NO: 38 - DNA, 10398 bp, Artificial Sequence
  pBac-U6(AAEL017774)-sgPb1-LongScaffold-3_UTR-U6(AAEL017763)-sgPb2 -LongScaffold-3_UTR-3xp3-tdTomato
tatccacagaatcaggggataacgcaggaaagaacatgtgagcaaaaggccagcaaaaggccaggaaccgtaaaaaggccgcgttgctggcgtttttccataggctccgcccccctgacgagcatcacaaaaatcgacgctcaagtcagaggtggcgaaacccgacaggactataaagataccaggcgtttccccctggaagctccctcgtgcgctctcctgttccgaccctgccgcttaccggatacctgtccgcctttctcccttcgggaagcgtggcgctttctcaatgctcacgctgtaggtatctcagttcggtgtaggtcgttcgctccaagctgggctgtgtgcacgaaccccccgttcagcccgaccgctgcgccttatccggtaactatcgtcttgagtccaacccggtaagacacgacttatcgccactggcagcagccactggtaacaggattagcagagcgaggtatgtaggcggtgctacagagttcttgaagtggtggcctaactacggctacactagaaggacagtatttggtatctgcgctctgctgaagccagttaccttcggaaaaagagttggtagctcttgatccggcaaacaaaccaccgctggtagcggtggtttttttgtttgcaagcagcagattacgcgcagaaaaaaaggatctcaagaagatcctttgatcttttctacggggtctgacgctcagtggaacgaaaactcacgttaagggattttggtcatgagattatcaaaaaggatcttcacctagatccttttaaattaaaaatgaagttttaaatcaatctaaagtatatatgagtaaacttggtctgacagttaccaatgcttaatcagtgaggcacctatctcagcgatctgtctatttcgttcatccatagttgcctgactccccgtcgtgtagataactacgatacgggagggcttaccatctggccccagtgctgcaatgataccgcgagacccacgctcaccggctccagatttatcagcaataaaccagccagccggaagggccgagcgcagaagtggtcctgcaactttatccgcctccatccagtctattaattgttgccgggaagctagagtaagtagttcgccagttaatagtttgcgcaacgttgttgccattgctacaggcatcgtggtgtcacgctcgtcgtttggtatggcttcattcagctccggttcccaacgatcaaggcgagttacatgatcccccatgttgtgcaaaaaagcggttagctccttcggtcctccgatcgttgtcagaagtaagttggccgcagtgttatcactcatggttatggcagcactgcataattctcttactgtcatgccatccgtaagatgcttttctgtgactggtgagtactcaaccaagtcattctgagaatagtgtatgcggcgaccgagttgctcttgcccggcgtcaatacgggataataccgcgccacatagcagaactttaaaagtgctcatcattggaaaacgttcttcggggcgaaaactctcaaggatcttaccgctgttgagatccagttcgatgtaacccactcgtgcacccaactgatcttcagcatcttttactttcaccagcgtttctgggtgagcaaaaacaggaaggcaaaatgccgcaaaaaagggaataagggcgacacggaaatgttgaatactcatactcttcctttttcaatattattgaagcatttatcagggttattgtctcatgagcggatacatatttgaatgtatttagaaaaataaacaaataggggttccgcgcacatttccccgaaaagtgccacctgacgtctaagaaaccattattatcatgacattaacctataaaaataggcgtatcacgaggccctttcgtctcgcgcgtttcggtgatgacggtgaaaacctctgacacatgcagctcccggagacggtcacagcttgtctgtaagcggatgccgggagcagacaagcccgtcagggcgcgtcagcgggtgttggcgggtgtcggggctggcttaactatgcggcatcagagcagattgtactgagagtgcaccatatgcggtgtgaaataccgcacagatgcgtaaggagaaaataccgcatcaggcgccattcgccattcaggctgcgcaactgttgggaagggcgatcggtgcgggcctcttcgctattacgccagctggcgaaagggggatgtgctgcaaggcgattaagttgggtaacgccagggttttcccagtcacgacgttgtaaaacgacggccagtgccaagctttgtttaaaatataacaaaattgtgatcccacaaaatgaagtggggcaaaatcaaataattaactagtgtccgtaaacttgttggtcttcaactttttgaggaacacgttggacggcaaatcgtgactataacacaagttgatttaataattttagccaacacgtcgggctgcgtgttttttgcgctctgtgtacacgttgattaactggtcgattaaataatttaatttttggttcttctttaaatctgtgatgaaattttttaaaataactttaaattcttcattggtaaaaaatgccacgttttgcaacttgtgagggtctaatatgaggtcaaactcagtaggagttttatccaaaaaagaaaacatgattacgtctgtacacgaacgcgtattaacgcagagtgcaaagtataagagggttaaaaaatatattttacgcaccatatacgcatcgggttgatatcgttaatatggatcaatttgaacagttgattaacgtgtctctgctcaagtctttgatcaaaacgcaaatcgacgaaaatgtgtcggacaatatcaagtcgatgagcgaaaaactaaaaaggctagaatacgacaatctcacagacagcgttgagatatacggtattcacgacagcaggctgaataataaaaaaattagaaactattatttaaccctagaaagataatcatattgtgacgtacgttaaagataatcatgcgtaaaattgacgcatgtgttttatcggtctgtatatcgaggtttatttattaatttgaatagatattaagttttattatatttacacttacatactaataataaattcaacaaacaatttatttatgtttatttatttattaaaaaaaaacaaaaactcaaaatttcttctataaagtaacaaaacttttaaacattctctcttttacaaaaataaacttattttgtactttaaaaacagtcatgttgtattataaaataagtaattagcttaacttatacataatagaaacaaattatacttattagtcagtcagaaacaactttggcacatatcaatattatgctctcgacaaataacttttttgcattttttgcacgatgcatttgcctttcgccttattttagaggggcagtaagtacagtaagtacgttttttcattactggctcttcagtactgtcatctgatgtaccaggcacttcatttggcaaaatattagagatattatcgcgcaaatatctcttcaaagtaggagcttctaaacgcttacgcataaacgatgacgtcaggctcatgtaaaggtttctcataaattttttgcgactttgaaccttttctcccttgctactgacattatggctgtatataataaaagaatttatgcaggcaatgtttatcattccgtacaataatgccataggccacctattcgtcttcctactgcaggtcatcacagaacacatttggtctagcgtgtccactccgcctttagtttgattataatacataaccatttgcggtttaccggtactttcgttgatagaagcatcctcatcacaagatgataataagtataccatcttagctggcttcggtttatatgagacgagagtaaggggtccgtcaaaacaaaacatcgatgttcccactggcctggagcgactgtttttcagtacttccggtatctcgcgtttgtttgatcgcacggttcccacaatggttaattcgagctcgcccgggctcctaggagatcttcatcacaaacgaaactattataatcgtcttcaggggaacggtagcatcatatctgtcaccagtcagtcggattcctttctttcggcataaattatgctcgggtgacgagacgagttgaaaatcccgtaaattaaaacatataccacactcgccgtcctagacgacgacgacgacgacgattcccaaggaattgaacccttcatttgcatttcactaccgctctgagagatgcaaagcgcgccagacagtcgatcgaatctgcagaccagagagtcacatcaagaatgttgacattccaccagaagactctaattattcttcgctcgactgggaaaactgttaacaactgctcgagtgtggtcggagcggctcacagtgcgttttcccgtagacaaaaatcaaatttcatggtatttttcggcgataaacagtaagttaaagggaacccgaatttagtgctatataatttaattccactagagtttgtatcctttgatagatacgcgtatttcgacctcaactgcaaggccgtcgtgtactagacttgactaatccagactggtcttttagttatgacttctgtccacatctccatacattcaacgcactgtgcggctgtgctgtgcgactccgtcgagtcgaccaacatagttgaaacaaattgaatatttaattgatcgttataggaatggtgttagatgagtcatcctttacagtaagcacatacagtattataattgaagatcgtcggcagataggtgtgtagggtagagtatcagcaataagttgggacgtttgactttttgtaggtagacaaaaactaaactttttttcgcttctctatgtgtgcccctgggtagcgttccgttccgattggggtgcgaacgaatgaaatcgcccatcgagttgatacgtccatccatcgctagaaccgcgttcgctgtagaagactatataagagcagaggcaagagtagtgaaatgttaagaactcggccatcgagtcttagagctatgctggaaacagcatagcaagttaagataaggctagtccgttatcaacttgaaaaagtggcaccgagtcggtgctttttttggtggttgttcatcgattcctaatattgcagtgaagcagtttgttgtgcatggcgaagataaggttagggcgaggaatgccttggaaataagcggcactgggccgtatgaataaaaagcgttgaactttactacatgtagcatctactcaaaaacaaaatccacaaagtttactacacttttggtatgaataaaaaccttttcgaacatgtagtacctactactttaagaaaattctattcaaagtacagagtaatgctgcatgttaagaaaattccattcagagtgactcttgaaatcaataaaatcatgcatatatgccaaatttgtcacttattcacgtgacaaattatgtgaaaatatgaatattactacattcccgctatgcatcgcgtaatcgatcatgaaatttatgttggttatgtaactttacagtattccctttatgtgcatgtgaattttataatgatttgacaacaaggattttccttagaattttcgaattttagctagaaatctgtatcctatgaatgaatcttgagataacagcaattgtaacattataaagttcctaacattttcaagattccagtattgagtcgcgatcgcttaattaaccgcggatatgtcttgccgaagcacattaacccaagccatttatatatcaagtacaagttgatttgattctagtgatggactgacacgaatctatggcactgttgcagagcttacaaacaggtacccggagtcgcttcaattattcaatcatccattcaaaaacttccatctcttccaattagccaatattcaaattggaatccagccagccgacggaggcagatggtctacctggcaactatagagtttccatgtttccagactttccctcccggtaaacggagacaaaacgacagacgtaagtaggtacatatgcataccgcacggacaaatcaaatttgtctggcagctccaattagagtcgttaaaaatttaacgatgcgctaaataacttcaagctatttgtctcgctggattggcttcgagtggtaagatcctatcaaatgccgaaaacaaaaaactttcttcttaattgttcgttcttcaacacctctccatggtgataacggatacggtttcattgtcagcatccatcctccgaaaaatacattacgccttgaaatatgcaatcgcaaacacggatctgtttggaacatttattttactatgaagagatgcgataggtaatatttatttgagcgtttaagatactcattgttctctcaaagaatgtcattgaaagccaacgaggtcaaatcaaatattataataaaaaggtcaaagaggactaacttaaagctctctttatggataggaaaaaatattttcgcccatcgctagaacttttaccgtttccattgagtatataactaagatgaatgaggctaattgatgcaagttaagcctgaaacaagtcttagagctatgctggaaacagcatagcaagttaagataaggctagtccgttatcaacttgaaaaagtggcaccgagtcggtgctttttttaagatgcttcggcaattaataataaggaatggtaaagcattcttcaaatgttactatgttctcaaattttcaagaattaggtattcaagaaattctttcaggcatattccataatctgcacaagcagctactttagaaattattgccgggcttaaattatatgtacaacatttcctgagtattttctgacaaaaattctcacaagggaaggtcacgatggagttacacggggtttttaaccggactatttttgttagattctacatgtcgaaatatgaaaaaccccaaagcctttcgggtgatggaccagtggtgtagccaggaggggctctgaaaggggtaattttgtacgtatattatattattaagctaattggaaatttgacaaaaatatttttttagtatttattgtgatggtagagaacaaaattgacattaatgtacgtttgaaatgtatttgccatgcctttggcgtactaacatggagtatggacaccaaaaccgatttcggccttttgggcccggcgcgccaattcgagctcgcccggggatctaattcaattagagactaattcaattagagctaattcaattaggatccaagcttatcgatttcgaaccctcgaccgccggagtataaatagaggcgcttcgtctacggagcgacaattcaattcaaacaagcaaagtgaacacgtcgctaagcgaaagctaagcaaataaacaagcgcagctgaacaagctaaacaatcggggtaccgctagagtcgacggtacgatccaccggtcgccaccatggtgagcaagggcgaggaggtcatcaaagagttcatgcgcttcaaggtgcgcatggagggctccatgaacggccacgagttcgagatcgagggcgagggcgagggccgcccctacgagggcacccagaccgccaagctgaaggtgaccaagggcggccccctgcccttcgcctgggacatcctgtccccccagttcatgtacggctccaaggcgtacgtgaagcaccccgccgacatccccgattacaagaagctgtccttccccgagggcttcaagtgggagcgcgtgatgaacttcgaggacggcggtctggtgaccgtgacccaggactcctccctgcaggacggcacgctgatctacaaggtgaagatgcgcggcaccaacttcccccccgacggccccgtaatgcagaagaagaccatgggctgggaggcctccaccgagcgcctgtacccccgcgacggcgtgctgaagggcgagatccaccaggccctgaagctgaaggacggcggccactacctggtggagttcaagaccatctacatggccaagaagcccgtgcaactgcccggctactactacgtggacaccaagctggacatcacctcccacaacgaggactacaccatcgtggaacagtacgagcgctccgagggccgccaccacctgttcctggggcatggcaccggcagcaccggcagcggcagctccggcaccgcctcctccgaggacaacaacatggccgttatcaaggaatttatgcgcttcaaagttaggatggagggatccatgaacggacatgagttcgagatcgagggagagggcgagggacgcccgtatgaaggcacacaaacagccaaactcaaggtcaccaagggcggaccactgcccttcgcctgggatatcctgagtccccagtttatgtacggcagcaaggcctacgttaagcaccccgctgacataccggactacaaaaagctgtcctttccggaaggcttcaagtgggagcgcgtgatgaatttcgaagacggaggactggtcactgtgacccaagatagcagtttgcaggacggtacactgatctataaggttaaaatgcgcggcactaactttccgccagatggcccagtgatgcagaagaagaccatgggttgggaggcatccaccgaacgtctgtaccctcgagacggagtgctcaagggcgagatccatcaggccctcaaactgaaagatggtggtcactacctggtcgaatttaagaccatttacatggccaagaagccggttcagctgcccggatattattatgtggatacgaaactggatataacttcgcataacgaagactacaccattgtcgagcagtatgagcgcagcgaaggccgacatcacctgttcctctacggcatggacgagctgtacaagtaggcggccgcgactctagatcataatcagccataccacatttgtagaggttttacttgctttaaaaaacctcccacacctccccctgaacctgaaacataaaatgaatgcaattgttgttgttaacttgtttattgcagcttataatggttacaaataaagcaatagcatcacaaatttcacaaataaagcatttttttcactgcattctagttgtggtttgtccaaactcatcaatgtatcttaaagcttctaggccggccgatctcggatctgacaatgttcagtgcagagactcggctacgcctcgtggactttgaagttgaccaacaatgtttattcttacctctaatagtcctctgtggcaaggtcaagattctgttagaagccaatgaagaacctggttgttcaataacattttgttcgtctaatatttcactaccgcttgacgttggctgcacttcatgtacctcatctataaacgcttcttctgtatcgctctggacgtcatcttcacttacgtgatctgatatttcactgtcagaatcctcaccaacaagctcgtcatcgctttgcagaagagcagagaggatatgctcatcgtctaaagaactacccattttattatatattagtcacgatatctataacaagaaaatatatatataataagttatcacgtaagtagaacatgaaataacaatataattatcgtatgagttaaatcttaaaagtcacgtaaaagataatcatgcgtcattttgactcacgcggtcgttatagttcaaaatcagtgacacttaccgcattgacaagcacgcctcacgggagctccaagcggcgactgagatgtcctaaatgcacagcgacggattcgcgctatttagaaagagagagcaatatttcaagaatgcatgcgtcaattttacgcagactatctttctagggttaaaaaagatttgcgctttactcgacctaaactttaaacacgtcatagaatcttcgtttgacaaaaaccacattgtggccaagctgtgtgacgcgacgcgcgctaaagaatggcaaaccaagtcgcgcgagcgtcgactctagaggatccccgggtaccgagctcgaattcgtaatcatggtcatagctgtttcctgtgtgaaattgttatccgctcacaattccacacaacatacgagccggaagcataaagtgtaaagcctggggtgcctaatgagtgagctaactcacattaattgcgttgcgctcactgcccgctttccagtcgggaaacctgtcgtgccagctgcattaatgaatcggccaacgcgcggggagaggcggtttgcgtattgggcgctcttccgcttcctcgctcactgactcgctgcgctcggtcgttcggctgcggcgagcggtatcagctcactcaaaggcggtaatacggt

SEQ ID NO: 39 - DNA, 13580 bp, Artificial Sequence
  pBac-U6(AAEL017774)-sgBTub1--U6(AAEL017763)-sgBTub2-U6(AAEL017774 )-sgBTub3-U6(AAEL017763)-sgBTub4-LongScaffold-3_UTR-3xp3-tdTomato -v3
tatccacagaatcaggggataacgcaggaaagaacatgtgagcaaaaggccagcaaaaggccaggaaccgtaaaaaggccgcgttgctggcgtttttccataggctccgcccccctgacgagcatcacaaaaatcgacgctcaagtcagaggtggcgaaacccgacaggactataaagataccaggcgtttccccctggaagctccctcgtgcgctctcctgttccgaccctgccgcttaccggatacctgtccgcctttctcccttcgggaagcgtggcgctttctcaatgctcacgctgtaggtatctcagttcggtgtaggtcgttcgctccaagctgggctgtgtgcacgaaccccccgttcagcccgaccgctgcgccttatccggtaactatcgtcttgagtccaacccggtaagacacgacttatcgccactggcagcagccactggtaacaggattagcagagcgaggtatgtaggcggtgctacagagttcttgaagtggtggcctaactacggctacactagaaggacagtatttggtatctgcgctctgctgaagccagttaccttcggaaaaagagttggtagctcttgatccggcaaacaaaccaccgctggtagcggtggtttttttgtttgcaagcagcagattacgcgcagaaaaaaaggatctcaagaagatcctttgatcttttctacggggtctgacgctcagtggaacgaaaactcacgttaagggattttggtcatgagattatcaaaaaggatcttcacctagatccttttaaattaaaaatgaagttttaaatcaatctaaagtatatatgagtaaacttggtctgacagttaccaatgcttaatcagtgaggcacctatctcagcgatctgtctatttcgttcatccatagttgcctgactccccgtcgtgtagataactacgatacgggagggcttaccatctggccccagtgctgcaatgataccgcgagacccacgctcaccggctccagatttatcagcaataaaccagccagccggaagggccgagcgcagaagtggtcctgcaactttatccgcctccatccagtctattaattgttgccgggaagctagagtaagtagttcgccagttaatagtttgcgcaacgttgttgccattgctacaggcatcgtggtgtcacgctcgtcgtttggtatggcttcattcagctccggttcccaacgatcaaggcgagttacatgatcccccatgttgtgcaaaaaagcggttagctccttcggtcctccgatcgttgtcagaagtaagttggccgcagtgttatcactcatggttatggcagcactgcataattctcttactgtcatgccatccgtaagatgcttttctgtgactggtgagtactcaaccaagtcattctgagaatagtgtatgcggcgaccgagttgctcttgcccggcgtcaatacgggataataccgcgccacatagcagaactttaaaagtgctcatcattggaaaacgttcttcggggcgaaaactctcaaggatcttaccgctgttgagatccagttcgatgtaacccactcgtgcacccaactgatcttcagcatcttttactttcaccagcgtttctgggtgagcaaaaacaggaaggcaaaatgccgcaaaaaagggaataagggcgacacggaaatgttgaatactcatactcttcctttttcaatattattgaagcatttatcagggttattgtctcatgagcggatacatatttgaatgtatttagaaaaataaacaaataggggttccgcgcacatttccccgaaaagtgccacctgacgtctaagaaaccattattatcatgacattaacctataaaaataggcgtatcacgaggccctttcgtctcgcgcgtttcggtgatgacggtgaaaacctctgacacatgcagctcccggagacggtcacagcttgtctgtaagcggatgccgggagcagacaagcccgtcagggcgcgtcagcgggtgttggcgggtgtcggggctggcttaactatgcggcatcagagcagattgtactgagagtgcaccatatgcggtgtgaaataccgcacagatgcgtaaggagaaaataccgcatcaggcgccattcgccattcaggctgcgcaactgttgggaagggcgatcggtgcgggcctcttcgctattacgccagctggcgaaagggggatgtgctgcaaggcgattaagttgggtaacgccagggttttcccagtcacgacgttgtaaaacgacggccagtgccaagctttgtttaaaatataacaaaattgtgatcccacaaaatgaagtggggcaaaatcaaataattaactagtgtccgtaaacttgttggtcttcaactttttgaggaacacgttggacggcaaatcgtgactataacacaagttgatttaataattttagccaacacgtcgggctgcgtgttttttgcgctctgtgtacacgttgattaactggtcgattaaataatttaatttttggttcttctttaaatctgtgatgaaattttttaaaataactttaaattcttcattggtaaaaaatgccacgttttgcaacttgtgagggtctaatatgaggtcaaactcagtaggagttttatccaaaaaagaaaacatgattacgtctgtacacgaacgcgtattaacgcagagtgcaaagtataagagggttaaaaaatatattttacgcaccatatacgcatcgggttgatatcgttaatatggatcaatttgaacagttgattaacgtgtctctgctcaagtctttgatcaaaacgcaaatcgacgaaaatgtgtcggacaatatcaagtcgatgagcgaaaaactaaaaaggctagaatacgacaatctcacagacagcgttgagatatacggtattcacgacagcaggctgaataataaaaaaattagaaactattatttaaccctagaaagataatcatattgtgacgtacgttaaagataatcatgcgtaaaattgacgcatgtgttttatcggtctgtatatcgaggtttatttattaatttgaatagatattaagttttattatatttacacttacatactaataataaattcaacaaacaatttatttatgtttatttatttattaaaaaaaaacaaaaactcaaaatttcttctataaagtaacaaaacttttaaacattctctcttttacaaaaataaacttattttgtactttaaaaacagtcatgttgtattataaaataagtaattagcttaacttatacataatagaaacaaattatacttattagtcagtcagaaacaactttggcacatatcaatattatgctctcgacaaataacttttttgcattttttgcacgatgcatttgcctttcgccttattttagaggggcagtaagtacagtaagtacgttttttcattactggctcttcagtactgtcatctgatgtaccaggcacttcatttggcaaaatattagagatattatcgcgcaaatatctcttcaaagtaggagcttctaaacgcttacgcataaacgatgacgtcaggctcatgtaaaggtttctcataaattttttgcgactttgaaccttttctcccttgctactgacattatggctgtatataataaaagaatttatgcaggcaatgtttatcattccgtacaataatgccataggccacctattcgtcttcctactgcaggtcatcacagaacacatttggtctagcgtgtccactccgcctttagtttgattataatacataaccatttgcggtttaccggtactttcgttgatagaagcatcctcatcacaagatgataataagtataccatcttagctggcttcggtttatatgagacgagagtaaggggtccgtcaaaacaaaacatcgatgttcccactggcctggagcgactgtttttcagtacttccggtatctcgcgtttgtttgatcgcacggttcccacaatggttaattcgagctcgcccgggctcctaggagatcttcatcacaaacgaaactattataatcgtcttcaggggaacggtagcatcatatctgtcaccagtcagtcggattcctttctttcggcataaattatgctcgggtgacgagacgagttgaaaatcccgtaaattaaaacatataccacactcgccgtcctagacgacgacgacgacgacgattcccaaggaattgaacccttcatttgcatttcactaccgctctgagagatgcaaagcgcgccagacagtcgatcgaatctgcagaccagagagtcacatcaagaatgttgacattccaccagaagactctaattattcttcgctcgactgggaaaactgttaacaactgctcgagtgtggtcggagcggctcacagtgcgttttcccgtagacaaaaatcaaatttcatggtatttttcggcgataaacagtaagttaaagggaacccgaatttagtgctatataatttaattccactagagtttgtatcctttgatagatacgcgtatttcgacctcaactgcaaggccgtcgtgtactagacttgactaatccagactggtcttttagttatgacttctgtccacatctccatacattcaacgcactgtgcggctgtgctgtgcgactccgtcgagtcgaccaacatagttgaaacaaattgaatatttaattgatcgttataggaatggtgttagatgagtcatcctttacagtaagcacatacagtattataattgaagatcgtcggcagataggtgtgtagggtagagtatcagcaataagttgggacgtttgactttttgtaggtagacaaaaactaaactttttttcgcttctctatgtgtgcccctgggtagcgttccgttccgattggggtgcgaacgaatgaaatcgcccatcgagttgatacgtccatccatcgctagaaccgcgttcgctgtagaagactatataagagcagaggcaagagtagtgaaattactacaacgaggctaccgggtcttagagctatgctggaaacagcatagcaagttaagataaggctagtccgttatcaacttgaaaaagtggcaccgagtcggtgctttttttggtggttgttcatcgattcctaatattgcagtgaagcagtttgttgtgcatggcgaagataaggttagggcgaggaatgccttggaaataagcggcactgggccgtatgaataaaaagcgttgaactttactacatgtagcatctactcaaaaacaaaatccacaaagtttactacacttttggtatgaataaaaaccttttcgaacatgtagtacctactactttaagaaaattctattcaaagtacagagtaatgctgcatgttaagaaaattccattcagagtgactcttgaaatcaataaaatcatgcatatatgccaaatttgtcacttattcacgtgacaaattatgtgaaaatatgaatattactacattcccgctatgcatcgcgtaatcgatcatgaaatttatgttggttatgtaactttacagtattccctttatgtgcatgtgaattttataatgatttgacaacaaggattttccttagaattttcgaattttagctagaaatctgtatcctatgaatgaatcttgagataacagcaattgtaacattataaagttcctaacattttcaagattccagtattgagtcgcgatcgcttaattaaccgcggatatgtcttgccgaagcacattaacccaagccatttatatatcaagtacaagttgatttgattctagtgatggactgacacgaatctatggcactgttgcagagcttacaaacaggtacccggagtcgcttcaattattcaatcatccattcaaaaacttccatctcttccaattagccaatattcaaattggaatccagccagccgacggaggcagatggtctacctggcaactatagagtttccatgtttccagactttccctcccggtaaacggagacaaaacgacagacgtaagtaggtacatatgcataccgcacggacaaatcaaatttgtctggcagctccaattagagtcgttaaaaatttaacgatgcgctaaataacttcaagctatttgtctcgctggattggcttcgagtggtaagatcctatcaaatgccgaaaacaaaaaactttcttcttaattgttcgttcttcaacacctctccatggtgataacggatacggtttcattgtcagcatccatcctccgaaaaatacattacgccttgaaatatgcaatcgcaaacacggatctgtttggaacatttattttactatgaagagatgcgataggtaatatttatttgagcgtttaagatactcattgttctctcaaagaatgtcattgaaagccaacgaggtcaaatcaaatattataataaaaaggtcaaagaggactaacttaaagctctctttatggataggaaaaaatattttcgcccatcgctagaacttttaccgtttccattgagtatataactaagatgaatgaggctaattgatgtctccgcaatacgccccgggtcttagagctatgctggaaacagcatagcaagttaagataaggctagtccgttatcaacttgaaaaagtggcaccgagtcggtgctttttttaagatgcttcggcaattaataataaggaatggtaaagcattcttcaaatgttactatgttctcaaattttcaagaattaggtattcaagaaattctttcaggcatattccataatctgcacaagcagctactttagaaattattgccgggcttaaattatatgtacaacatttcctgagtattttctgacaaaaattctcacaagggaaggtcacgatggagttacacggggtttttaaccggactatttttgttagattctacatgtcgaaatatgaaaaaccccaaagcctttcgggtgatggaccagtggtgtagccaggaggggctctgaaaggggtaattttgtacgtatattatattattaagctaattggaaatttgacaaaaatatttttttagtatttattgtgatggtagagaacaaaattgacattaatgtacgtttgaaatgtatttgccatgcctttggcgtactaacatggagtatggacaccaaaaccgatttcgctagcgtttaaactcatcacaaacgaaactattataatcgtcttcaggggaacggtagcatcatatctgtcaccagtcagtcggattcctttctttcggcataaattatgctcgggtgacgagacgagttgaaaatcccgtaaattaaaacatataccacactcgccgtcctagacgacgacgacgacgacgattcccaaggaattgaacccttcatttgcatttcactaccgctctgagagatgcaaagcgcgccagacagtcgatcgaatctgcagaccagagagtcacatcaagaatgttgacattccaccagaagactctaattattcttcgctcgactgggaaaactgttaacaactgctcgagtgtggtcggagcggctcacagtgcgttttcccgtagacaaaaatcaaatttcatggtatttttcggcgataaacagtaagttaaagggaacccgaatttagtgctatataatttaattccactagagtttgtatcctttgatagatacgcgtatttcgacctcaactgcaaggccgtcgtgtactagacttgactaatccagactggtcttttagttatgacttctgtccacatctccatacattcaacgcactgtgcggctgtgctgtgcgactccgtcgagtcgaccaacatagttgaaacaaattgaatatttaattgatcgttataggaatggtgttagatgagtcatcctttacagtaagcacatacagtattataattgaagatcgtcggcagataggtgtgtagggtagagtatcagcaataagttgggacgtttgactttttgtaggtagacaaaaactaaactttttttcgcttctctatgtgtgcccctgggtagcgttccgttccgattggggtgcgaacgaatgaaatcgcccatcgagttgatacgtccatccatcgctagaaccgcgttcgctgtagaagactatataagagcagaggcaagagtagtgaaatgataggagccaagttctggggtcttagagctatgctggaaacagcatagcaagttaagataaggctagtccgttatcaacttgaaaaagtggcaccgagtcggtgctttttttggtggttgttcatcgattcctaatattgcagtgaagcagtttgttgtgcatggcgaagataaggttagggcgaggaatgccttggaaataagcggcactgggccgtatgaataaaaagcgttgaactttactacatgtagcatctactcaaaaacaaaatccacaaagtttactacacttttggtatgaataaaaaccttttcgaacatgtagtacctactactttaagaaaattctattcaaagtacagagtaatgctgcatgttaagaaaattccattcagagtgactcttgaaatcaataaaatcatgcatatatgccaaatttgtcacttattcacgtgacaaattatgtgaaaatatgaatattactacattcccgctatgcatcgcgtaatcgatcatgaaatttatgttggttatgtaactttacagtattccctttatgtgcatgtgaattttataatgatttgacaacaaggattttccttagaattttcgaattttagctagaaatctgtatcctatgaatgaatcttgagataacagcaattgtaacattataaagttcctaacattttcaagattccagtattgagtcgcgatcgcttaattaaccgcggatatgtcttgccgaagcacattaacccaagccatttatatatcaagtacaagttgatttgattctagtgatggactgacacgaatctatggcactgttgcagagcttacaaacaggtacccggagtcgcttcaattattcaatcatccattcaaaaacttccatctcttccaattagccaatattcaaattggaatccagccagccgacggaggcagatggtctacctggcaactatagagtttccatgtttccagactttccctcccggtaaacggagacaaaacgacagacgtaagtaggtacatatgcataccgcacggacaaatcaaatttgtctggcagctccaattagagtcgttaaaaatttaacgatgcgctaaataacttcaagctatttgtctcgctggattggcttcgagtggtaagatcctatcaaatgccgaaaacaaaaaactttcttcttaattgttcgttcttcaacacctctccatggtgataacggatacggtttcattgtcagcatccatcctccgaaaaatacattacgccttgaaatatgcaatcgcaaacacggatctgtttggaacatttattttactatgaagagatgcgataggtaatatttatttgagcgtttaagatactcattgttctctcaaagaatgtcattgaaagccaacgaggtcaaatcaaatattataataaaaaggtcaaagaggactaacttaaagctctctttatggataggaaaaaatattttcgcccatcgctagaacttttaccgtttccattgagtatataactaagatgaatgaggctaattgatcactatggattcggtccgaggtcttagagctatgctggaaacagcatagcaagttaagataaggctagtccgttatcaacttgaaaaagtggcaccgagtcggtgctttttttaagatgcttcggcaattaataataaggaatggtaaagcattcttcaaatgttactatgttctcaaattttcaagaattaggtattcaagaaattctttcaggcatattccataatctgcacaagcagctactttagaaattattgccgggcttaaattatatgtacaacatttcctgagtattttctgacaaaaattctcacaagggaaggtcacgatggagttacacggggtttttaaccggactatttttgttagattctacatgtcgaaatatgaaaaaccccaaagcctttcgggtgatggaccagtggtgtagccaggaggggctctgaaaggggtaattttgtacgtatattatattattaagctaattggaaatttgacaaaaatatttttttagtatttattgtgatggtagagaacaaaattgacattaatgtacgtttgaaatgtatttgccatgcctttggcgtactaacatggagtatggacaccaaaaccgatttcggccttttgggcccggcgcgccaattcgagctcgcccggggatctaattcaattagagactaattcaattagagctaattcaattaggatccaagcttatcgatttcgaaccctcgaccgccggagtataaatagaggcgcttcgtctacggagcgacaattcaattcaaacaagcaaagtgaacacgtcgctaagcgaaagctaagcaaataaacaagcgcagctgaacaagctaaacaatcggggtaccgctagagtcgacggtacgatccaccggtcgccaccatggtgagcaagggcgaggaggtcatcaaagagttcatgcgcttcaaggtgcgcatggagggctccatgaacggccacgagttcgagatcgagggcgagggcgagggccgcccctacgagggcacccagaccgccaagctgaaggtgaccaagggcggccccctgcccttcgcctgggacatcctgtccccccagttcatgtacggctccaaggcgtacgtgaagcaccccgccgacatccccgattacaagaagctgtccttccccgagggcttcaagtgggagcgcgtgatgaacttcgaggacggcggtctggtgaccgtgacccaggactcctccctgcaggacggcacgctgatctacaaggtgaagatgcgcggcaccaacttcccccccgacggccccgtaatgcagaagaagaccatgggctgggaggcctccaccgagcgcctgtacccccgcgacggcgtgctgaagggcgagatccaccaggccctgaagctgaaggacggcggccactacctggtggagttcaagaccatctacatggccaagaagcccgtgcaactgcccggctactactacgtggacaccaagctggacatcacctcccacaacgaggactacaccatcgtggaacagtacgagcgctccgagggccgccaccacctgttcctggggcatggcaccggcagcaccggcagcggcagctccggcaccgcctcctccgaggacaacaacatggccgttatcaaggaatttatgcgcttcaaagttaggatggagggatccatgaacggacatgagttcgagatcgagggagagggcgagggacgcccgtatgaaggcacacaaacagccaaactcaaggtcaccaagggcggaccactgcccttcgcctgggatatcctgagtccccagtttatgtacggcagcaaggcctacgttaagcaccccgctgacataccggactacaaaaagctgtcctttccggaaggcttcaagtgggagcgcgtgatgaatttcgaagacggaggactggtcactgtgacccaagatagcagtttgcaggacggtacactgatctataaggttaaaatgcgcggcactaactttccgccagatggcccagtgatgcagaagaagaccatgggttgggaggcatccaccgaacgtctgtaccctcgagacggagtgctcaagggcgagatccatcaggccctcaaactgaaagatggtggtcactacctggtcgaatttaagaccatttacatggccaagaagccggttcagctgcccggatattattatgtggatacgaaactggatataacttcgcataacgaagactacaccattgtcgagcagtatgagcgcagcgaaggccgacatcacctgttcctctacggcatggacgagctgtacaagtaggcggccgcgactctagatcataatcagccataccacatttgtagaggttttacttgctttaaaaaacctcccacacctccccctgaacctgaaacataaaatgaatgcaattgttgttgttaacttgtttattgcagcttataatggttacaaataaagcaatagcatcacaaatttcacaaataaagcatttttttcactgcattctagttgtggtttgtccaaactcatcaatgtatcttaaagcttctaggccggccgatctcggatctgacaatgttcagtgcagagactcggctacgcctcgtggactttgaagttgaccaacaatgtttattcttacctctaatagtcctctgtggcaaggtcaagattctgttagaagccaatgaagaacctggttgttcaataacattttgttcgtctaatatttcactaccgcttgacgttggctgcacttcatgtacctcatctataaacgcttcttctgtatcgctctggacgtcatcttcacttacgtgatctgatatttcactgtcagaatcctcaccaacaagctcgtcatcgctttgcagaagagcagagaggatatgctcatcgtctaaagaactacccattttattatatattagtcacgatatctataacaagaaaatatatatataataagttatcacgtaagtagaacatgaaataacaatataattatcgtatgagttaaatcttaaaagtcacgtaaaagataatcatgcgtcattttgactcacgcggtcgttatagttcaaaatcagtgacacttaccgcattgacaagcacgcctcacgggagctccaagcggcgactgagatgtcctaaatgcacagcgacggattcgcgctatttagaaagagagagcaatatttcaagaatgcatgcgtcaattttacgcagactatctttctagggttaaaaaagatttgcgctttactcgacctaaactttaaacacgtcatagaatcttcgtttgacaaaaaccacattgtggccaagctgtgtgacgcgacgcgcgctaaagaatggcaaaccaagtcgcgcgagcgtcgactctagaggatccccgggtaccgagctcgaattcgtaatcatggtcatagctgtttcctgtgtgaaattgttatccgctcacaattccacacaacatacgagccggaagcataaagtgtaaagcctggggtgcctaatgagtgagctaactcacattaattgcgttgcgctcactgcccgctttccagtcgggaaacctgtcgtgccagctgcattaatgaatcggccaacgcgcggggagaggcggtttgcgtattgggcgctcttccgcttcctcgctcactgactcgctgcgctcggtcgttcggctgcggcgagcggtatcagctcactcaaaggcggtaatacggt

SEQ ID NO: 40 - DNA, 13580 bp, Artificial Sequence
  pBac-U6(AAEL017774)-sgDsx1--U6(AAEL017763)-sgDsx2-U6(AAEL017774)- sgDsx3-U6(AAEL017763)-sgDsx4-LongScaffold-3_UTR-3xp3-tdTomato-v3
tatccacagaatcaggggataacgcaggaaagaacatgtgagcaaaaggccagcaaaaggccaggaaccgtaaaaaggccgcgttgctggcgtttttccataggctccgcccccctgacgagcatcacaaaaatcgacgctcaagtcagaggtggcgaaacccgacaggactataaagataccaggcgtttccccctggaagctccctcgtgcgctctcctgttccgaccctgccgcttaccggatacctgtccgcctttctcccttcgggaagcgtggcgctttctcaatgctcacgctgtaggtatctcagttcggtgtaggtcgttcgctccaagctgggctgtgtgcacgaaccccccgttcagcccgaccgctgcgccttatccggtaactatcgtcttgagtccaacccggtaagacacgacttatcgccactggcagcagccactggtaacaggattagcagagcgaggtatgtaggcggtgctacagagttcttgaagtggtggcctaactacggctacactagaaggacagtatttggtatctgcgctctgctgaagccagttaccttcggaaaaagagttggtagctcttgatccggcaaacaaaccaccgctggtagcggtggtttttttgtttgcaagcagcagattacgcgcagaaaaaaaggatctcaagaagatcctttgatcttttctacggggtctgacgctcagtggaacgaaaactcacgttaagggattttggtcatgagattatcaaaaaggatcttcacctagatccttttaaattaaaaatgaagttttaaatcaatctaaagtatatatgagtaaacttggtctgacagttaccaatgcttaatcagtgaggcacctatctcagcgatctgtctatttcgttcatccatagttgcctgactccccgtcgtgtagataactacgatacgggagggcttaccatctggccccagtgctgcaatgataccgcgagacccacgctcaccggctccagatttatcagcaataaaccagccagccggaagggccgagcgcagaagtggtcctgcaactttatccgcctccatccagtctattaattgttgccgggaagctagagtaagtagttcgccagttaatagtttgcgcaacgttgttgccattgctacaggcatcgtggtgtcacgctcgtcgtttggtatggcttcattcagctccggttcccaacgatcaaggcgagttacatgatcccccatgttgtgcaaaaaagcggttagctccttcggtcctccgatcgttgtcagaagtaagttggccgcagtgttatcactcatggttatggcagcactgcataattctcttactgtcatgccatccgtaagatgcttttctgtgactggtgagtactcaaccaagtcattctgagaatagtgtatgcggcgaccgagttgctcttgcccggcgtcaatacgggataataccgcgccacatagcagaactttaaaagtgctcatcattggaaaacgttcttcggggcgaaaactctcaaggatcttaccgctgttgagatccagttcgatgtaacccactcgtgcacccaactgatcttcagcatcttttactttcaccagcgtttctgggtgagcaaaaacaggaaggcaaaatgccgcaaaaaagggaataagggcgacacggaaatgttgaatactcatactcttcctttttcaatattattgaagcatttatcagggttattgtctcatgagcggatacatatttgaatgtatttagaaaaataaacaaataggggttccgcgcacatttccccgaaaagtgccacctgacgtctaagaaaccattattatcatgacattaacctataaaaataggcgtatcacgaggccctttcgtctcgcgcgtttcggtgatgacggtgaaaacctctgacacatgcagctcccggagacggtcacagcttgtctgtaagcggatgccgggagcagacaagcccgtcagggcgcgtcagcgggtgttggcgggtgtcggggctggcttaactatgcggcatcagagcagattgtactgagagtgcaccatatgcggtgtgaaataccgcacagatgcgtaaggagaaaataccgcatcaggcgccattcgccattcaggctgcgcaactgttgggaagggcgatcggtgcgggcctcttcgctattacgccagctggcgaaagggggatgtgctgcaaggcgattaagttgggtaacgccagggttttcccagtcacgacgttgtaaaacgacggccagtgccaagctttgtttaaaatataacaaaattgtgatcccacaaaatgaagtggggcaaaatcaaataattaactagtgtccgtaaacttgttggtcttcaactttttgaggaacacgttggacggcaaatcgtgactataacacaagttgatttaataattttagccaacacgtcgggctgcgtgttttttgcgctctgtgtacacgttgattaactggtcgattaaataatttaatttttggttcttctttaaatctgtgatgaaattttttaaaataactttaaattcttcattggtaaaaaatgccacgttttgcaacttgtgagggtctaatatgaggtcaaactcagtaggagttttatccaaaaaagaaaacatgattacgtctgtacacgaacgcgtattaacgcagagtgcaaagtataagagggttaaaaaatatattttacgcaccatatacgcatcgggttgatatcgttaatatggatcaatttgaacagttgattaacgtgtctctgctcaagtctttgatcaaaacgcaaatcgacgaaaatgtgtcggacaatatcaagtcgatgagcgaaaaactaaaaaggctagaatacgacaatctcacagacagcgttgagatatacggtattcacgacagcaggctgaataataaaaaaattagaaactattatttaaccctagaaagataatcatattgtgacgtacgttaaagataatcatgcgtaaaattgacgcatgtgttttatcggtctgtatatcgaggtttatttattaatttgaatagatattaagttttattatatttacacttacatactaataataaattcaacaaacaatttatttatgtttatttatttattaaaaaaaaacaaaaactcaaaatttcttctataaagtaacaaaacttttaaacattctctcttttacaaaaataaacttattttgtactttaaaaacagtcatgttgtattataaaataagtaattagcttaacttatacataatagaaacaaattatacttattagtcagtcagaaacaactttggcacatatcaatattatgctctcgacaaataacttttttgcattttttgcacgatgcatttgcctttcgccttattttagaggggcagtaagtacagtaagtacgttttttcattactggctcttcagtactgtcatctgatgtaccaggcacttcatttggcaaaatattagagatattatcgcgcaaatatctcttcaaagtaggagcttctaaacgcttacgcataaacgatgacgtcaggctcatgtaaaggtttctcataaattttttgcgactttgaaccttttctcccttgctactgacattatggctgtatataataaaagaatttatgcaggcaatgtttatcattccgtacaataatgccataggccacctattcgtcttcctactgcaggtcatcacagaacacatttggtctagcgtgtccactccgcctttagtttgattataatacataaccatttgcggtttaccggtactttcgttgatagaagcatcctcatcacaagatgataataagtataccatcttagctggcttcggtttatatgagacgagagtaaggggtccgtcaaaacaaaacatcgatgttcccactggcctggagcgactgtttttcagtacttccggtatctcgcgtttgtttgatcgcacggttcccacaatggttaattcgagctcgcccgggctcctaggagatcttcatcacaaacgaaactattataatcgtcttcaggggaacggtagcatcatatctgtcaccagtcagtcggattcctttctttcggcataaattatgctcgggtgacgagacgagttgaaaatcccgtaaattaaaacatataccacactcgccgtcctagacgacgacgacgacgacgattcccaaggaattgaacccttcatttgcatttcactaccgctctgagagatgcaaagcgcgccagacagtcgatcgaatctgcagaccagagagtcacatcaagaatgttgacattccaccagaagactctaattattcttcgctcgactgggaaaactgttaacaactgctcgagtgtggtcggagcggctcacagtgcgttttcccgtagacaaaaatcaaatttcatggtatttttcggcgataaacagtaagttaaagggaacccgaatttagtgctatataatttaattccactagagtttgtatcctttgatagatacgcgtatttcgacctcaactgcaaggccgtcgtgtactagacttgactaatccagactggtcttttagttatgacttctgtccacatctccatacattcaacgcactgtgcggctgtgctgtgcgactccgtcgagtcgaccaacatagttgaaacaaattgaatatttaattgatcgttataggaatggtgttagatgagtcatcctttacagtaagcacatacagtattataattgaagatcgtcggcagataggtgtgtagggtagagtatcagcaataagttgggacgtttgactttttgtaggtagacaaaaactaaactttttttcgcttctctatgtgtgcccctgggtagcgttccgttccgattggggtgcgaacgaatgaaatcgcccatcgagttgatacgtccatccatcgctagaaccgcgttcgctgtagaagactatataagagcagaggcaagagtagtgaaatagcgacatgcagccattctggtcttagagctatgctggaaacagcatagcaagttaagataaggctagtccgttatcaacttgaaaaagtggcaccgagtcggtgctttttttggtggttgttcatcgattcctaatattgcagtgaagcagtttgttgtgcatggcgaagataaggttagggcgaggaatgccttggaaataagcggcactgggccgtatgaataaaaagcgttgaactttactacatgtagcatctactcaaaaacaaaatccacaaagtttactacacttttggtatgaataaaaaccttttcgaacatgtagtacctactactttaagaaaattctattcaaagtacagagtaatgctgcatgttaagaaaattccattcagagtgactcttgaaatcaataaaatcatgcatatatgccaaatttgtcacttattcacgtgacaaattatgtgaaaatatgaatattactacattcccgctatgcatcgcgtaatcgatcatgaaatttatgttggttatgtaactttacagtattccctttatgtgcatgtgaattttataatgatttgacaacaaggattttccttagaattttcgaattttagctagaaatctgtatcctatgaatgaatcttgagataacagcaattgtaacattataaagttcctaacattttcaagattccagtattgagtcgcgatcgcttaattaaccgcggatatgtcttgccgaagcacattaacccaagccatttatatatcaagtacaagttgatttgattctagtgatggactgacacgaatctatggcactgttgcagagcttacaaacaggtacccggagtcgcttcaattattcaatcatccattcaaaaacttccatctcttccaattagccaatattcaaattggaatccagccagccgacggaggcagatggtctacctggcaactatagagtttccatgtttccagactttccctcccggtaaacggagacaaaacgacagacgtaagtaggtacatatgcataccgcacggacaaatcaaatttgtctggcagctccaattagagtcgttaaaaatttaacgatgcgctaaataacttcaagctatttgtctcgctggattggcttcgagtggtaagatcctatcaaatgccgaaaacaaaaaactttcttcttaattgttcgttcttcaacacctctccatggtgataacggatacggtttcattgtcagcatccatcctccgaaaaatacattacgccttgaaatatgcaatcgcaaacacggatctgtttggaacatttattttactatgaagagatgcgataggtaatatttatttgagcgtttaagatactcattgttctctcaaagaatgtcattgaaagccaacgaggtcaaatcaaatattataataaaaaggtcaaagaggactaacttaaagctctctttatggataggaaaaaatattttcgcccatcgctagaacttttaccgtttccattgagtatataactaagatgaatgaggctaattgatctcacaagtagagctacacggtcttagagctatgctggaaacagcatagcaagttaagataaggctagtccgttatcaacttgaaaaagtggcaccgagtcggtgctttttttaagatgcttcggcaattaataataaggaatggtaaagcattcttcaaatgttactatgttctcaaattttcaagaattaggtattcaagaaattctttcaggcatattccataatctgcacaagcagctactttagaaattattgccgggcttaaattatatgtacaacatttcctgagtattttctgacaaaaattctcacaagggaaggtcacgatggagttacacggggtttttaaccggactatttttgttagattctacatgtcgaaatatgaaaaaccccaaagcctttcgggtgatggaccagtggtgtagccaggaggggctctgaaaggggtaattttgtacgtatattatattattaagctaattggaaatttgacaaaaatatttttttagtatttattgtgatggtagagaacaaaattgacattaatgtacgtttgaaatgtatttgccatgcctttggcgtactaacatggagtatggacaccaaaaccgatttcgctagcgtttaaactcatcacaaacgaaactattataatcgtcttcaggggaacggtagcatcatatctgtcaccagtcagtcggattcctttctttcggcataaattatgctcgggtgacgagacgagttgaaaatcccgtaaattaaaacatataccacactcgccgtcctagacgacgacgacgacgacgattcccaaggaattgaacccttcatttgcatttcactaccgctctgagagatgcaaagcgcgccagacagtcgatcgaatctgcagaccagagagtcacatcaagaatgttgacattccaccagaagactctaattattcttcgctcgactgggaaaactgttaacaactgctcgagtgtggtcggagcggctcacagtgcgttttcccgtagacaaaaatcaaatttcatggtatttttcggcgataaacagtaagttaaagggaacccgaatttagtgctatataatttaattccactagagtttgtatcctttgatagatacgcgtatttcgacctcaactgcaaggccgtcgtgtactagacttgactaatccagactggtcttttagttatgacttctgtccacatctccatacattcaacgcactgtgcggctgtgctgtgcgactccgtcgagtcgaccaacatagttgaaacaaattgaatatttaattgatcgttataggaatggtgttagatgagtcatcctttacagtaagcacatacagtattataattgaagatcgtcggcagataggtgtgtagggtagagtatcagcaataagttgggacgtttgactttttgtaggtagacaaaaactaaactttttttcgcttctctatgtgtgcccctgggtagcgttccgttccgattggggtgcgaacgaatgaaatcgcccatcgagttgatacgtccatccatcgctagaaccgcgttcgctgtagaagactatataagagcagaggcaagagtagtgaaatggtagctggccgttgccaaagtcttagagctatgctggaaacagcatagcaagttaagataaggctagtccgttatcaacttgaaaaagtggcaccgagtcggtgctttttttggtggttgttcatcgattcctaatattgcagtgaagcagtttgttgtgcatggcgaagataaggttagggcgaggaatgccttggaaataagcggcactgggccgtatgaataaaaagcgttgaactttactacatgtagcatctactcaaaaacaaaatccacaaagtttactacacttttggtatgaataaaaaccttttcgaacatgtagtacctactactttaagaaaattctattcaaagtacagagtaatgctgcatgttaagaaaattccattcagagtgactcttgaaatcaataaaatcatgcatatatgccaaatttgtcacttattcacgtgacaaattatgtgaaaatatgaatattactacattcccgctatgcatcgcgtaatcgatcatgaaatttatgttggttatgtaactttacagtattccctttatgtgcatgtgaattttataatgatttgacaacaaggattttccttagaattttcgaattttagctagaaatctgtatcctatgaatgaatcttgagataacagcaattgtaacattataaagttcctaacattttcaagattccagtattgagtcgcgatcgcttaattaaccgcggatatgtcttgccgaagcacattaacccaagccatttatatatcaagtacaagttgatttgattctagtgatggactgacacgaatctatggcactgttgcagagcttacaaacaggtacccggagtcgcttcaattattcaatcatccattcaaaaacttccatctcttccaattagccaatattcaaattggaatccagccagccgacggaggcagatggtctacctggcaactatagagtttccatgtttccagactttccctcccggtaaacggagacaaaacgacagacgtaagtaggtacatatgcataccgcacggacaaatcaaatttgtctggcagctccaattagagtcgttaaaaatttaacgatgcgctaaataacttcaagctatttgtctcgctggattggcttcgagtggtaagatcctatcaaatgccgaaaacaaaaaactttcttcttaattgttcgttcttcaacacctctccatggtgataacggatacggtttcattgtcagcatccatcctccgaaaaatacattacgccttgaaatatgcaatcgcaaacacggatctgtttggaacatttattttactatgaagagatgcgataggtaatatttatttgagcgtttaagatactcattgttctctcaaagaatgtcattgaaagccaacgaggtcaaatcaaatattataataaaaaggtcaaagaggactaacttaaagctctctttatggataggaaaaaatattttcgcccatcgctagaacttttaccgtttccattgagtatataactaagatgaatgaggctaattgatctgtcgtcgtttttttccgggtcttagagctatgctggaaacagcatagcaagttaagataaggctagtccgttatcaacttgaaaaagtggcaccgagtcggtgctttttttaagatgcttcggcaattaataataaggaatggtaaagcattcttcaaatgttactatgttctcaaattttcaagaattaggtattcaagaaattctttcaggcatattccataatctgcacaagcagctactttagaaattattgccgggcttaaattatatgtacaacatttcctgagtattttctgacaaaaattctcacaagggaaggtcacgatggagttacacggggtttttaaccggactatttttgttagattctacatgtcgaaatatgaaaaaccccaaagcctttcgggtgatggaccagtggtgtagccaggaggggctctgaaaggggtaattttgtacgtatattatattattaagctaattggaaatttgacaaaaatatttttttagtatttattgtgatggtagagaacaaaattgacattaatgtacgtttgaaatgtatttgccatgcctttggcgtactaacatggagtatggacaccaaaaccgatttcggccttttgggcccggcgcgccaattcgagctcgcccggggatctaattcaattagagactaattcaattagagctaattcaattaggatccaagcttatcgatttcgaaccctcgaccgccggagtataaatagaggcgcttcgtctacggagcgacaattcaattcaaacaagcaaagtgaacacgtcgctaagcgaaagctaagcaaataaacaagcgcagctgaacaagctaaacaatcggggtaccgctagagtcgacggtacgatccaccggtcgccaccatggtgagcaagggcgaggaggtcatcaaagagttcatgcgcttcaaggtgcgcatggagggctccatgaacggccacgagttcgagatcgagggcgagggcgagggccgcccctacgagggcacccagaccgccaagctgaaggtgaccaagggcggccccctgcccttcgcctgggacatcctgtccccccagttcatgtacggctccaaggcgtacgtgaagcaccccgccgacatccccgattacaagaagctgtccttccccgagggcttcaagtgggagcgcgtgatgaacttcgaggacggcggtctggtgaccgtgacccaggactcctccctgcaggacggcacgctgatctacaaggtgaagatgcgcggcaccaacttcccccccgacggccccgtaatgcagaagaagaccatgggctgggaggcctccaccgagcgcctgtacccccgcgacggcgtgctgaagggcgagatccaccaggccctgaagctgaaggacggcggccactacctggtggagttcaagaccatctacatggccaagaagcccgtgcaactgcccggctactactacgtggacaccaagctggacatcacctcccacaacgaggactacaccatcgtggaacagtacgagcgctccgagggccgccaccacctgttcctggggcatggcaccggcagcaccggcagcggcagctccggcaccgcctcctccgaggacaacaacatggccgttatcaaggaatttatgcgcttcaaagttaggatggagggatccatgaacggacatgagttcgagatcgagggagagggcgagggacgcccgtatgaaggcacacaaacagccaaactcaaggtcaccaagggcggaccactgcccttcgcctgggatatcctgagtccccagtttatgtacggcagcaaggcctacgttaagcaccccgctgacataccggactacaaaaagctgtcctttccggaaggcttcaagtgggagcgcgtgatgaatttcgaagacggaggactggtcactgtgacccaagatagcagtttgcaggacggtacactgatctataaggttaaaatgcgcggcactaactttccgccagatggcccagtgatgcagaagaagaccatgggttgggaggcatccaccgaacgtctgtaccctcgagacggagtgctcaagggcgagatccatcaggccctcaaactgaaagatggtggtcactacctggtcgaatttaagaccatttacatggccaagaagccggttcagctgcccggatattattatgtggatacgaaactggatataacttcgcataacgaagactacaccattgtcgagcagtatgagcgcagcgaaggccgacatcacctgttcctctacggcatggacgagctgtacaagtaggcggccgcgactctagatcataatcagccataccacatttgtagaggttttacttgctttaaaaaacctcccacacctccccctgaacctgaaacataaaatgaatgcaattgttgttgttaacttgtttattgcagcttataatggttacaaataaagcaatagcatcacaaatttcacaaataaagcatttttttcactgcattctagttgtggtttgtccaaactcatcaatgtatcttaaagcttctaggccggccgatctcggatctgacaatgttcagtgcagagactcggctacgcctcgtggactttgaagttgaccaacaatgtttattcttacctctaatagtcctctgtggcaaggtcaagattctgttagaagccaatgaagaacctggttgttcaataacattttgttcgtctaatatttcactaccgcttgacgttggctgcacttcatgtacctcatctataaacgcttcttctgtatcgctctggacgtcatcttcacttacgtgatctgatatttcactgtcagaatcctcaccaacaagctcgtcatcgctttgcagaagagcagagaggatatgctcatcgtctaaagaactacccattttattatatattagtcacgatatctataacaagaaaatatatatataataagttatcacgtaagtagaacatgaaataacaatataattatcgtatgagttaaatcttaaaagtcacgtaaaagataatcatgcgtcattttgactcacgcggtcgttatagttcaaaatcagtgacacttaccgcattgacaagcacgcctcacgggagctccaagcggcgactgagatgtcctaaatgcacagcgacggattcgcgctatttagaaagagagagcaatatttcaagaatgcatgcgtcaattttacgcagactatctttctagggttaaaaaagatttgcgctttactcgacctaaactttaaacacgtcatagaatcttcgtttgacaaaaaccacattgtggccaagctgtgtgacgcgacgcgcgctaaagaatggcaaaccaagtcgcgcgagcgtcgactctagaggatccccgggtaccgagctcgaattcgtaatcatggtcatagctgtttcctgtgtgaaattgttatccgctcacaattccacacaacatacgagccggaagcataaagtgtaaagcctggggtgcctaatgagtgagctaactcacattaattgcgttgcgctcactgcccgctttccagtcgggaaacctgtcgtgccagctgcattaatgaatcggccaacgcgcggggagaggcggtttgcgtattgggcgctcttccgcttcctcgctcactgactcgctgcgctcggtcgttcggctgcggcgagcggtatcagctcactcaaaggcggtaatacggt

SEQ ID NO: 41 - DNA, 13580 bp, Artificial Sequence
  pBac-U6(AAEL017774)-sgZpg1--U6(AAEL017763)-sgZpg2-U6(AAEL017774)- sgZpg3-U6(AAEL017763)-sgZpg4-LongScaffold-3_UTR-3xp3-tdTomato-v3
tatccacagaatcaggggataacgcaggaaagaacatgtgagcaaaaggccagcaaaaggccaggaaccgtaaaaaggccgcgttgctggcgtttttccataggctccgcccccctgacgagcatcacaaaaatcgacgctcaagtcagaggtggcgaaacccgacaggactataaagataccaggcgtttccccctggaagctccctcgtgcgctctcctgttccgaccctgccgcttaccggatacctgtccgcctttctcccttcgggaagcgtggcgctttctcaatgctcacgctgtaggtatctcagttcggtgtaggtcgttcgctccaagctgggctgtgtgcacgaaccccccgttcagcccgaccgctgcgccttatccggtaactatcgtcttgagtccaacccggtaagacacgacttatcgccactggcagcagccactggtaacaggattagcagagcgaggtatgtaggcggtgctacagagttcttgaagtggtggcctaactacggctacactagaaggacagtatttggtatctgcgctctgctgaagccagttaccttcggaaaaagagttggtagctcttgatccggcaaacaaaccaccgctggtagcggtggtttttttgtttgcaagcagcagattacgcgcagaaaaaaaggatctcaagaagatcctttgatcttttctacggggtctgacgctcagtggaacgaaaactcacgttaagggattttggtcatgagattatcaaaaaggatcttcacctagatccttttaaattaaaaatgaagttttaaatcaatctaaagtatatatgagtaaacttggtctgacagttaccaatgcttaatcagtgaggcacctatctcagcgatctgtctatttcgttcatccatagttgcctgactccccgtcgtgtagataactacgatacgggagggcttaccatctggccccagtgctgcaatgataccgcgagacccacgctcaccggctccagatttatcagcaataaaccagccagccggaagggccgagcgcagaagtggtcctgcaactttatccgcctccatccagtctattaattgttgccgggaagctagagtaagtagttcgccagttaatagtttgcgcaacgttgttgccattgctacaggcatcgtggtgtcacgctcgtcgtttggtatggcttcattcagctccggttcccaacgatcaaggcgagttacatgatcccccatgttgtgcaaaaaagcggttagctccttcggtcctccgatcgttgtcagaagtaagttggccgcagtgttatcactcatggttatggcagcactgcataattctcttactgtcatgccatccgtaagatgcttttctgtgactggtgagtactcaaccaagtcattctgagaatagtgtatgcggcgaccgagttgctcttgcccggcgtcaatacgggataataccgcgccacatagcagaactttaaaagtgctcatcattggaaaacgttcttcggggcgaaaactctcaaggatcttaccgctgttgagatccagttcgatgtaacccactcgtgcacccaactgatcttcagcatcttttactttcaccagcgtttctgggtgagcaaaaacaggaaggcaaaatgccgcaaaaaagggaataagggcgacacggaaatgttgaatactcatactcttcctttttcaatattattgaagcatttatcagggttattgtctcatgagcggatacatatttgaatgtatttagaaaaataaacaaataggggttccgcgcacatttccccgaaaagtgccacctgacgtctaagaaaccattattatcatgacattaacctataaaaataggcgtatcacgaggccctttcgtctcgcgcgtttcggtgatgacggtgaaaacctctgacacatgcagctcccggagacggtcacagcttgtctgtaagcggatgccgggagcagacaagcccgtcagggcgcgtcagcgggtgttggcgggtgtcggggctggcttaactatgcggcatcagagcagattgtactgagagtgcaccatatgcggtgtgaaataccgcacagatgcgtaaggagaaaataccgcatcaggcgccattcgccattcaggctgcgcaactgttgggaagggcgatcggtgcgggcctcttcgctattacgccagctggcgaaagggggatgtgctgcaaggcgattaagttgggtaacgccagggttttcccagtcacgacgttgtaaaacgacggccagtgccaagctttgtttaaaatataacaaaattgtgatcccacaaaatgaagtggggcaaaatcaaataattaactagtgtccgtaaacttgttggtcttcaactttttgaggaacacgttggacggcaaatcgtgactataacacaagttgatttaataattttagccaacacgtcgggctgcgtgttttttgcgctctgtgtacacgttgattaactggtcgattaaataatttaatttttggttcttctttaaatctgtgatgaaattttttaaaataactttaaattcttcattggtaaaaaatgccacgttttgcaacttgtgagggtctaatatgaggtcaaactcagtaggagttttatccaaaaaagaaaacatgattacgtctgtacacgaacgcgtattaacgcagagtgcaaagtataagagggttaaaaaatatattttacgcaccatatacgcatcgggttgatatcgttaatatggatcaatttgaacagttgattaacgtgtctctgctcaagtctttgatcaaaacgcaaatcgacgaaaatgtgtcggacaatatcaagtcgatgagcgaaaaactaaaaaggctagaatacgacaatctcacagacagcgttgagatatacggtattcacgacagcaggctgaataataaaaaaattagaaactattatttaaccctagaaagataatcatattgtgacgtacgttaaagataatcatgcgtaaaattgacgcatgtgttttatcggtctgtatatcgaggtttatttattaatttgaatagatattaagttttattatatttacacttacatactaataataaattcaacaaacaatttatttatgtttatttatttattaaaaaaaaacaaaaactcaaaatttcttctataaagtaacaaaacttttaaacattctctcttttacaaaaataaacttattttgtactttaaaaacagtcatgttgtattataaaataagtaattagcttaacttatacataatagaaacaaattatacttattagtcagtcagaaacaactttggcacatatcaatattatgctctcgacaaataacttttttgcattttttgcacgatgcatttgcctttcgccttattttagaggggcagtaagtacagtaagtacgttttttcattactggctcttcagtactgtcatctgatgtaccaggcacttcatttggcaaaatattagagatattatcgcgcaaatatctcttcaaagtaggagcttctaaacgcttacgcataaacgatgacgtcaggctcatgtaaaggtttctcataaattttttgcgactttgaaccttttctcccttgctactgacattatggctgtatataataaaagaatttatgcaggcaatgtttatcattccgtacaataatgccataggccacctattcgtcttcctactgcaggtcatcacagaacacatttggtctagcgtgtccactccgcctttagtttgattataatacataaccatttgcggtttaccggtactttcgttgatagaagcatcctcatcacaagatgataataagtataccatcttagctggcttcggtttatatgagacgagagtaaggggtccgtcaaaacaaaacatcgatgttcccactggcctggagcgactgtttttcagtacttccggtatctcgcgtttgtttgatcgcacggttcccacaatggttaattcgagctcgcccgggctcctaggagatcttcatcacaaacgaaactattataatcgtcttcaggggaacggtagcatcatatctgtcaccagtcagtcggattcctttctttcggcataaattatgctcgggtgacgagacgagttgaaaatcccgtaaattaaaacatataccacactcgccgtcctagacgacgacgacgacgacgattcccaaggaattgaacccttcatttgcatttcactaccgctctgagagatgcaaagcgcgccagacagtcgatcgaatctgcagaccagagagtcacatcaagaatgttgacattccaccagaagactctaattattcttcgctcgactgggaaaactgttaacaactgctcgagtgtggtcggagcggctcacagtgcgttttcccgtagacaaaaatcaaatttcatggtatttttcggcgataaacagtaagttaaagggaacccgaatttagtgctatataatttaattccactagagtttgtatcctttgatagatacgcgtatttcgacctcaactgcaaggccgtcgtgtactagacttgactaatccagactggtcttttagttatgacttctgtccacatctccatacattcaacgcactgtgcggctgtgctgtgcgactccgtcgagtcgaccaacatagttgaaacaaattgaatatttaattgatcgttataggaatggtgttagatgagtcatcctttacagtaagcacatacagtattataattgaagatcgtcggcagataggtgtgtagggtagagtatcagcaataagttgggacgtttgactttttgtaggtagacaaaaactaaactttttttcgcttctctatgtgtgcccctgggtagcgttccgttccgattggggtgcgaacgaatgaaatcgcccatcgagttgatacgtccatccatcgctagaaccgcgttcgctgtagaagactatataagagcagaggcaagagtagtgaaatgtgtagactggccctaacgggtcttagagctatgctggaaacagcatagcaagttaagataaggctagtccgttatcaacttgaaaaagtggcaccgagtcggtgctttttttggtggttgttcatcgattcctaatattgcagtgaagcagtttgttgtgcatggcgaagataaggttagggcgaggaatgccttggaaataagcggcactgggccgtatgaataaaaagcgttgaactttactacatgtagcatctactcaaaaacaaaatccacaaagtttactacacttttggtatgaataaaaaccttttcgaacatgtagtacctactactttaagaaaattctattcaaagtacagagtaatgctgcatgttaagaaaattccattcagagtgactcttgaaatcaataaaatcatgcatatatgccaaatttgtcacttattcacgtgacaaattatgtgaaaatatgaatattactacattcccgctatgcatcgcgtaatcgatcatgaaatttatgttggttatgtaactttacagtattccctttatgtgcatgtgaattttataatgatttgacaacaaggattttccttagaattttcgaattttagctagaaatctgtatcctatgaatgaatcttgagataacagcaattgtaacattataaagttcctaacattttcaagattccagtattgagtcgcgatcgcttaattaaccgcggatatgtcttgccgaagcacattaacccaagccatttatatatcaagtacaagttgatttgattctagtgatggactgacacgaatctatggcactgttgcagagcttacaaacaggtacccggagtcgcttcaattattcaatcatccattcaaaaacttccatctcttccaattagccaatattcaaattggaatccagccagccgacggaggcagatggtctacctggcaactatagagtttccatgtttccagactttccctcccggtaaacggagacaaaacgacagacgtaagtaggtacatatgcataccgcacggacaaatcaaatttgtctggcagctccaattagagtcgttaaaaatttaacgatgcgctaaataacttcaagctatttgtctcgctggattggcttcgagtggtaagatcctatcaaatgccgaaaacaaaaaactttcttcttaattgttcgttcttcaacacctctccatggtgataacggatacggtttcattgtcagcatccatcctccgaaaaatacattacgccttgaaatatgcaatcgcaaacacggatctgtttggaacatttattttactatgaagagatgcgataggtaatatttatttgagcgtttaagatactcattgttctctcaaagaatgtcattgaaagccaacgaggtcaaatcaaatattataataaaaaggtcaaagaggactaacttaaagctctctttatggataggaaaaaatattttcgcccatcgctagaacttttaccgtttccattgagtatataactaagatgaatgaggctaattgattctcgttccccaaacacttggtcttagagctatgctggaaacagcatagcaagttaagataaggctagtccgttatcaacttgaaaaagtggcaccgagtcggtgctttttttaagatgcttcggcaattaataataaggaatggtaaagcattcttcaaatgttactatgttctcaaattttcaagaattaggtattcaagaaattctttcaggcatattccataatctgcacaagcagctactttagaaattattgccgggcttaaattatatgtacaacatttcctgagtattttctgacaaaaattctcacaagggaaggtcacgatggagttacacggggtttttaaccggactatttttgttagattctacatgtcgaaatatgaaaaaccccaaagcctttcgggtgatggaccagtggtgtagccaggaggggctctgaaaggggtaattttgtacgtatattatattattaagctaattggaaatttgacaaaaatatttttttagtatttattgtgatggtagagaacaaaattgacattaatgtacgtttgaaatgtatttgccatgcctttggcgtactaacatggagtatggacaccaaaaccgatttcgctagcgtttaaactcatcacaaacgaaactattataatcgtcttcaggggaacggtagcatcatatctgtcaccagtcagtcggattcctttctttcggcataaattatgctcgggtgacgagacgagttgaaaatcccgtaaattaaaacatataccacactcgccgtcctagacgacgacgacgacgacgattcccaaggaattgaacccttcatttgcatttcactaccgctctgagagatgcaaagcgcgccagacagtcgatcgaatctgcagaccagagagtcacatcaagaatgttgacattccaccagaagactctaattattcttcgctcgactgggaaaactgttaacaactgctcgagtgtggtcggagcggctcacagtgcgttttcccgtagacaaaaatcaaatttcatggtatttttcggcgataaacagtaagttaaagggaacccgaatttagtgctatataatttaattccactagagtttgtatcctttgatagatacgcgtatttcgacctcaactgcaaggccgtcgtgtactagacttgactaatccagactggtcttttagttatgacttctgtccacatctccatacattcaacgcactgtgcggctgtgctgtgcgactccgtcgagtcgaccaacatagttgaaacaaattgaatatttaattgatcgttataggaatggtgttagatgagtcatcctttacagtaagcacatacagtattataattgaagatcgtcggcagataggtgtgtagggtagagtatcagcaataagttgggacgtttgactttttgtaggtagacaaaaactaaactttttttcgcttctctatgtgtgcccctgggtagcgttccgttccgattggggtgcgaacgaatgaaatcgcccatcgagttgatacgtccatccatcgctagaaccgcgttcgctgtagaagactatataagagcagaggcaagagtagtgaaattcatcaagaacatgttcagggtcttagagctatgctggaaacagcatagcaagttaagataaggctagtccgttatcaacttgaaaaagtggcaccgagtcggtgctttttttggtggttgttcatcgattcctaatattgcagtgaagcagtttgttgtgcatggcgaagataaggttagggcgaggaatgccttggaaataagcggcactgggccgtatgaataaaaagcgttgaactttactacatgtagcatctactcaaaaacaaaatccacaaagtttactacacttttggtatgaataaaaaccttttcgaacatgtagtacctactactttaagaaaattctattcaaagtacagagtaatgctgcatgttaagaaaattccattcagagtgactcttgaaatcaataaaatcatgcatatatgccaaatttgtcacttattcacgtgacaaattatgtgaaaatatgaatattactacattcccgctatgcatcgcgtaatcgatcatgaaatttatgttggttatgtaactttacagtattccctttatgtgcatgtgaattttataatgatttgacaacaaggattttccttagaattttcgaattttagctagaaatctgtatcctatgaatgaatcttgagataacagcaattgtaacattataaagttcctaacattttcaagattccagtattgagtcgcgatcgcttaattaaccgcggatatgtcttgccgaagcacattaacccaagccatttatatatcaagtacaagttgatttgattctagtgatggactgacacgaatctatggcactgttgcagagcttacaaacaggtacccggagtcgcttcaattattcaatcatccattcaaaaacttccatctcttccaattagccaatattcaaattggaatccagccagccgacggaggcagatggtctacctggcaactatagagtttccatgtttccagactttccctcccggtaaacggagacaaaacgacagacgtaagtaggtacatatgcataccgcacggacaaatcaaatttgtctggcagctccaattagagtcgttaaaaatttaacgatgcgctaaataacttcaagctatttgtctcgctggattggcttcgagtggtaagatcctatcaaatgccgaaaacaaaaaactttcttcttaattgttcgttcttcaacacctctccatggtgataacggatacggtttcattgtcagcatccatcctccgaaaaatacattacgccttgaaatatgcaatcgcaaacacggatctgtttggaacatttattttactatgaagagatgcgataggtaatatttatttgagcgtttaagatactcattgttctctcaaagaatgtcattgaaagccaacgaggtcaaatcaaatattataataaaaaggtcaaagaggactaacttaaagctctctttatggataggaaaaaatattttcgcccatcgctagaacttttaccgtttccattgagtatataactaagatgaatgaggctaattgatacagttggaaccgaacgctggtcttagagctatgctggaaacagcatagcaagttaagataaggctagtccgttatcaacttgaaaaagtggcaccgagtcggtgctttttttaagatgcttcggcaattaataataaggaatggtaaagcattcttcaaatgttactatgttctcaaattttcaagaattaggtattcaagaaattctttcaggcatattccataatctgcacaagcagctactttagaaattattgccgggcttaaattatatgtacaacatttcctgagtattttctgacaaaaattctcacaagggaaggtcacgatggagttacacggggtttttaaccggactatttttgttagattctacatgtcgaaatatgaaaaaccccaaagcctttcgggtgatggaccagtggtgtagccaggaggggctctgaaaggggtaattttgtacgtatattatattattaagctaattggaaatttgacaaaaatatttttttagtatttattgtgatggtagagaacaaaattgacattaatgtacgtttgaaatgtatttgccatgcctttggcgtactaacatggagtatggacaccaaaaccgatttcggccttttgggcccggcgcgccaattcgagctcgcccggggatctaattcaattagagactaattcaattagagctaattcaattaggatccaagcttatcgatttcgaaccctcgaccgccggagtataaatagaggcgcttcgtctacggagcgacaattcaattcaaacaagcaaagtgaacacgtcgctaagcgaaagctaagcaaataaacaagcgcagctgaacaagctaaacaatcggggtaccgctagagtcgacggtacgatccaccggtcgccaccatggtgagcaagggcgaggaggtcatcaaagagttcatgcgcttcaaggtgcgcatggagggctccatgaacggccacgagttcgagatcgagggcgagggcgagggccgcccctacgagggcacccagaccgccaagctgaaggtgaccaagggcggccccctgcccttcgcctgggacatcctgtccccccagttcatgtacggctccaaggcgtacgtgaagcaccccgccgacatccccgattacaagaagctgtccttccccgagggcttcaagtgggagcgcgtgatgaacttcgaggacggcggtctggtgaccgtgacccaggactcctccctgcaggacggcacgctgatctacaaggtgaagatgcgcggcaccaacttcccccccgacggccccgtaatgcagaagaagaccatgggctgggaggcctccaccgagcgcctgtacccccgcgacggcgtgctgaagggcgagatccaccaggccctgaagctgaaggacggcggccactacctggtggagttcaagaccatctacatggccaagaagcccgtgcaactgcccggctactactacgtggacaccaagctggacatcacctcccacaacgaggactacaccatcgtggaacagtacgagcgctccgagggccgccaccacctgttcctggggcatggcaccggcagcaccggcagcggcagctccggcaccgcctcctccgaggacaacaacatggccgttatcaaggaatttatgcgcttcaaagttaggatggagggatccatgaacggacatgagttcgagatcgagggagagggcgagggacgcccgtatgaaggcacacaaacagccaaactcaaggtcaccaagggcggaccactgcccttcgcctgggatatcctgagtccccagtttatgtacggcagcaaggcctacgttaagcaccccgctgacataccggactacaaaaagctgtcctttccggaaggcttcaagtgggagcgcgtgatgaatttcgaagacggaggactggtcactgtgacccaagatagcagtttgcaggacggtacactgatctataaggttaaaatgcgcggcactaactttccgccagatggcccagtgatgcagaagaagaccatgggttgggaggcatccaccgaacgtctgtaccctcgagacggagtgctcaagggcgagatccatcaggccctcaaactgaaagatggtggtcactacctggtcgaatttaagaccatttacatggccaagaagccggttcagctgcccggatattattatgtggatacgaaactggatataacttcgcataacgaagactacaccattgtcgagcagtatgagcgcagcgaaggccgacatcacctgttcctctacggcatggacgagctgtacaagtaggcggccgcgactctagatcataatcagccataccacatttgtagaggttttacttgctttaaaaaacctcccacacctccccctgaacctgaaacataaaatgaatgcaattgttgttgttaacttgtttattgcagcttataatggttacaaataaagcaatagcatcacaaatttcacaaataaagcatttttttcactgcattctagttgtggtttgtccaaactcatcaatgtatcttaaagcttctaggccggccgatctcggatctgacaatgttcagtgcagagactcggctacgcctcgtggactttgaagttgaccaacaatgtttattcttacctctaatagtcctctgtggcaaggtcaagattctgttagaagccaatgaagaacctggttgttcaataacattttgttcgtctaatatttcactaccgcttgacgttggctgcacttcatgtacctcatctataaacgcttcttctgtatcgctctggacgtcatcttcacttacgtgatctgatatttcactgtcagaatcctcaccaacaagctcgtcatcgctttgcagaagagcagagaggatatgctcatcgtctaaagaactacccattttattatatattagtcacgatatctataacaagaaaatatatatataataagttatcacgtaagtagaacatgaaataacaatataattatcgtatgagttaaatcttaaaagtcacgtaaaagataatcatgcgtcattttgactcacgcggtcgttatagttcaaaatcagtgacacttaccgcattgacaagcacgcctcacgggagctccaagcggcgactgagatgtcctaaatgcacagcgacggattcgcgctatttagaaagagagagcaatatttcaagaatgcatgcgtcaattttacgcagactatctttctagggttaaaaaagatttgcgctttactcgacctaaactttaaacacgtcatagaatcttcgtttgacaaaaaccacattgtggccaagctgtgtgacgcgacgcgcgctaaagaatggcaaaccaagtcgcgcgagcgtcgactctagaggatccccgggtaccgagctcgaattcgtaatcatggtcatagctgtttcctgtgtgaaattgttatccgctcacaattccacacaacatacgagccggaagcataaagtgtaaagcctggggtgcctaatgagtgagctaactcacattaattgcgttgcgctcactgcccgctttccagtcgggaaacctgtcgtgccagctgcattaatgaatcggccaacgcgcggggagaggcggtttgcgtattgggcgctcttccgcttcctcgctcactgactcgctgcgctcggtcgttcggctgcggcgagcggtatcagctcactcaaaggcggtaatacggt

SEQ ID NO: 42 - DNA, 13837 bp, Artificial Sequence
  pBac-U6(AAEL017774)-sgDsx1-U6(AAEL017774)-sgIsx1-U6(AAEL017774)-s gBTub3-U6(AAEL017763)-sgBTub2-LongScaffold-3_UTR-3xp3-tdTomato
tatccacagaatcaggggataacgcaggaaagaacatgtgagcaaaaggccagcaaaaggccaggaaccgtaaaaaggccgcgttgctggcgtttttccataggctccgcccccctgacgagcatcacaaaaatcgacgctcaagtcagaggtggcgaaacccgacaggactataaagataccaggcgtttccccctggaagctccctcgtgcgctctcctgttccgaccctgccgcttaccggatacctgtccgcctttctcccttcgggaagcgtggcgctttctcaatgctcacgctgtaggtatctcagttcggtgtaggtcgttcgctccaagctgggctgtgtgcacgaaccccccgttcagcccgaccgctgcgccttatccggtaactatcgtcttgagtccaacccggtaagacacgacttatcgccactggcagcagccactggtaacaggattagcagagcgaggtatgtaggcggtgctacagagttcttgaagtggtggcctaactacggctacactagaaggacagtatttggtatctgcgctctgctgaagccagttaccttcggaaaaagagttggtagctcttgatccggcaaacaaaccaccgctggtagcggtggtttttttgtttgcaagcagcagattacgcgcagaaaaaaaggatctcaagaagatcctttgatcttttctacggggtctgacgctcagtggaacgaaaactcacgttaagggattttggtcatgagattatcaaaaaggatcttcacctagatccttttaaattaaaaatgaagttttaaatcaatctaaagtatatatgagtaaacttggtctgacagttaccaatgcttaatcagtgaggcacctatctcagcgatctgtctatttcgttcatccatagttgcctgactccccgtcgtgtagataactacgatacgggagggcttaccatctggccccagtgctgcaatgataccgcgagacccacgctcaccggctccagatttatcagcaataaaccagccagccggaagggccgagcgcagaagtggtcctgcaactttatccgcctccatccagtctattaattgttgccgggaagctagagtaagtagttcgccagttaatagtttgcgcaacgttgttgccattgctacaggcatcgtggtgtcacgctcgtcgtttggtatggcttcattcagctccggttcccaacgatcaaggcgagttacatgatcccccatgttgtgcaaaaaagcggttagctccttcggtcctccgatcgttgtcagaagtaagttggccgcagtgttatcactcatggttatggcagcactgcataattctcttactgtcatgccatccgtaagatgcttttctgtgactggtgagtactcaaccaagtcattctgagaatagtgtatgcggcgaccgagttgctcttgcccggcgtcaatacgggataataccgcgccacatagcagaactttaaaagtgctcatcattggaaaacgttcttcggggcgaaaactctcaaggatcttaccgctgttgagatccagttcgatgtaacccactcgtgcacccaactgatcttcagcatcttttactttcaccagcgtttctgggtgagcaaaaacaggaaggcaaaatgccgcaaaaaagggaataagggcgacacggaaatgttgaatactcatactcttcctttttcaatattattgaagcatttatcagggttattgtctcatgagcggatacatatttgaatgtatttagaaaaataaacaaataggggttccgcgcacatttccccgaaaagtgccacctgacgtctaagaaaccattattatcatgacattaacctataaaaataggcgtatcacgaggccctttcgtctcgcgcgtttcggtgatgacggtgaaaacctctgacacatgcagctcccggagacggtcacagcttgtctgtaagcggatgccgggagcagacaagcccgtcagggcgcgtcagcgggtgttggcgggtgtcggggctggcttaactatgcggcatcagagcagattgtactgagagtgcaccatatgcggtgtgaaataccgcacagatgcgtaaggagaaaataccgcatcaggcgccattcgccattcaggctgcgcaactgttgggaagggcgatcggtgcgggcctcttcgctattacgccagctggcgaaagggggatgtgctgcaaggcgattaagttgggtaacgccagggttttcccagtcacgacgttgtaaaacgacggccagtgccaagctttgtttaaaatataacaaaattgtgatcccacaaaatgaagtggggcaaaatcaaataattaactagtgtccgtaaacttgttggtcttcaactttttgaggaacacgttggacggcaaatcgtgactataacacaagttgatttaataattttagccaacacgtcgggctgcgtgttttttgcgctctgtgtacacgttgattaactggtcgattaaataatttaatttttggttcttctttaaatctgtgatgaaattttttaaaataactttaaattcttcattggtaaaaaatgccacgttttgcaacttgtgagggtctaatatgaggtcaaactcagtaggagttttatccaaaaaagaaaacatgattacgtctgtacacgaacgcgtattaacgcagagtgcaaagtataagagggttaaaaaatatattttacgcaccatatacgcatcgggttgatatcgttaatatggatcaatttgaacagttgattaacgtgtctctgctcaagtctttgatcaaaacgcaaatcgacgaaaatgtgtcggacaatatcaagtcgatgagcgaaaaactaaaaaggctagaatacgacaatctcacagacagcgttgagatatacggtattcacgacagcaggctgaataataaaaaaattagaaactattatttaaccctagaaagataatcatattgtgacgtacgttaaagataatcatgcgtaaaattgacgcatgtgttttatcggtctgtatatcgaggtttatttattaatttgaatagatattaagttttattatatttacacttacatactaataataaattcaacaaacaatttatttatgtttatttatttattaaaaaaaaacaaaaactcaaaatttcttctataaagtaacaaaacttttaaacattctctcttttacaaaaataaacttattttgtactttaaaaacagtcatgttgtattataaaataagtaattagcttaacttatacataatagaaacaaattatacttattagtcagtcagaaacaactttggcacatatcaatattatgctctcgacaaataacttttttgcattttttgcacgatgcatttgcctttcgccttattttagaggggcagtaagtacagtaagtacgttttttcattactggctcttcagtactgtcatctgatgtaccaggcacttcatttggcaaaatattagagatattatcgcgcaaatatctcttcaaagtaggagcttctaaacgcttacgcataaacgatgacgtcaggctcatgtaaaggtttctcataaattttttgcgactttgaaccttttctcccttgctactgacattatggctgtatataataaaagaatttatgcaggcaatgtttatcattccgtacaataatgccataggccacctattcgtcttcctactgcaggtcatcacagaacacatttggtctagcgtgtccactccgcctttagtttgattataatacataaccatttgcggtttaccggtactttcgttgatagaagcatcctcatcacaagatgataataagtataccatcttagctggcttcggtttatatgagacgagagtaaggggtccgtcaaaacaaaacatcgatgttcccactggcctggagcgactgtttttcagtacttccggtatctcgcgtttgtttgatcgcacggttcccacaatggttaattcgagctcgcccgggctcctaggagatcttcatcacaaacgaaactattataatcgtcttcaggggaacggtagcatcatatctgtcaccagtcagtcggattcctttctttcggcataaattatgctcgggtgacgagacgagttgaaaatcccgtaaattaaaacatataccacactcgccgtcctagacgacgacgacgacgacgattcccaaggaattgaacccttcatttgcatttcactaccgctctgagagatgcaaagcgcgccagacagtcgatcgaatctgcagaccagagagtcacatcaagaatgttgacattccaccagaagactctaattattcttcgctcgactgggaaaactgttaacaactgctcgagtgtggtcggagcggctcacagtgcgttttcccgtagacaaaaatcaaatttcatggtatttttcggcgataaacagtaagttaaagggaacccgaatttagtgctatataatttaattccactagagtttgtatcctttgatagatacgcgtatttcgacctcaactgcaaggccgtcgtgtactagacttgactaatccagactggtcttttagttatgacttctgtccacatctccatacattcaacgcactgtgcggctgtgctgtgcgactccgtcgagtcgaccaacatagttgaaacaaattgaatatttaattgatcgttataggaatggtgttagatgagtcatcctttacagtaagcacatacagtattataattgaagatcgtcggcagataggtgtgtagggtagagtatcagcaataagttgggacgtttgactttttgtaggtagacaaaaactaaactttttttcgcttctctatgtgtgcccctgggtagcgttccgttccgattggggtgcgaacgaatgaaatcgcccatcgagttgatacgtccatccatcgctagaaccgcgttcgctgtagaagactatataagagcagaggcaagagtagtgaaatagcgacatgcagccattctggtcttagagctatgctggaaacagcatagcaagttaagataaggctagtccgttatcaacttgaaaaagtggcaccgagtcggtgctttttttggtggttgttcatcgattcctaatattgcagtgaagcagtttgttgtgcatggcgaagataaggttagggcgaggaatgccttggaaataagcggcactgggccgtatgaataaaaagcgttgaactttactacatgtagcatctactcaaaaacaaaatccacaaagtttactacacttttggtatgaataaaaaccttttcgaacatgtagtacctactactttaagaaaattctattcaaagtacagagtaatgctgcatgttaagaaaattccattcagagtgactcttgaaatcaataaaatcatgcatatatgccaaatttgtcacttattcacgtgacaaattatgtgaaaatatgaatattactacattcccgctatgcatcgcgtaatcgatcatgaaatttatgttggttatgtaactttacagtattccctttatgtgcatgtgaattttataatgatttgacaacaaggattttccttagaattttcgaattttagctagaaatctgtatcctatgaatgaatcttgagataacagcaattgtaacattataaagttcctaacattttcaagattccagtattgagtcgcgatcgcttaattaaccgcggtcatcacaaacgaaactattataatcgtcttcaggggaacggtagcatcatatctgtcaccagtcagtcggattcctttctttcggcataaattatgctcgggtgacgagacgagttgaaaatcccgtaaattaaaacatataccacactcgccgtcctagacgacgacgacgacgacgattcccaaggaattgaacccttcatttgcatttcactaccgctctgagagatgcaaagcgcgccagacagtcgatcgaatctgcagaccagagagtcacatcaagaatgttgacattccaccagaagactctaattattcttcgctcgactgggaaaactgttaacaactgctcgagtgtggtcggagcggctcacagtgcgttttcccgtagacaaaaatcaaatttcatggtatttttcggcgataaacagtaagttaaagggaacccgaatttagtgctatataatttaattccactagagtttgtatcctttgatagatacgcgtatttcgacctcaactgcaaggccgtcgtgtactagacttgactaatccagactggtcttttagttatgacttctgtccacatctccatacattcaacgcactgtgcggctgtgctgtgcgactccgtcgagtcgaccaacatagttgaaacaaattgaatatttaattgatcgttataggaatggtgttagatgagtcatcctttacagtaagcacatacagtattataattgaagatcgtcggcagataggtgtgtagggtagagtatcagcaataagttgggacgtttgactttttgtaggtagacaaaaactaaactttttttcgcttctctatgtgtgcccctgggtagcgttccgttccgattggggtgcgaacgaatgaaatcgcccatcgagttgatacgtccatccatcgctagaaccgcgttcgctgtagaagactatataagagcagaggcaagagtagtgaaatgcgggattcgctctcgacgagtcttagagctatgctggaaacagcatagcaagttaagataaggctagtccgttatcaacttgaaaaagtggcaccgagtcggtgctttttttggtggttgttcatcgattcctaatattgcagtgaagcagtttgttgtgcatggcgaagataaggttagggcgaggaatgccttggaaataagcggcactgggccgtatgaataaaaagcgttgaactttactacatgtagcatctactcaaaaacaaaatccacaaagtttactacacttttggtatgaataaaaaccttttcgaacatgtagtacctactactttaagaaaattctattcaaagtacagagtaatgctgcatgttaagaaaattccattcagagtgactcttgaaatcaataaaatcatgcatatatgccaaatttgtcacttattcacgtgacaaattatgtgaaaatatgaatattactacattcccgctatgcatcgcgtaatcgatcatgaaatttatgttggttatgtaactttacagtattccctttatgtgcatgtgaattttataatgatttgacaacaaggattttccttagaattttcgaattttagctagaaatctgtatcctatgaatgaatcttgagataacagcaattgtaacattataaagttcctaacattttcaagattccagtattgaggccttttgggcccatttaaatcttaagtcatcacaaacgaaactattataatcgtcttcaggggaacggtagcatcatatctgtcaccagtcagtcggattcctttctttcggcataaattatgctcgggtgacgagacgagttgaaaatcccgtaaattaaaacatataccacactcgccgtcctagacgacgacgacgacgacgattcccaaggaattgaacccttcatttgcatttcactaccgctctgagagatgcaaagcgcgccagacagtcgatcgaatctgcagaccagagagtcacatcaagaatgttgacattccaccagaagactctaattattcttcgctcgactgggaaaactgttaacaactgctcgagtgtggtcggagcggctcacagtgcgttttcccgtagacaaaaatcaaatttcatggtatttttcggcgataaacagtaagttaaagggaacccgaatttagtgctatataatttaattccactagagtttgtatcctttgatagatacgcgtatttcgacctcaactgcaaggccgtcgtgtactagacttgactaatccagactggtcttttagttatgacttctgtccacatctccatacattcaacgcactgtgcggctgtgctgtgcgactccgtcgagtcgaccaacatagttgaaacaaattgaatatttaattgatcgttataggaatggtgttagatgagtcatcctttacagtaagcacatacagtattataattgaagatcgtcggcagataggtgtgtagggtagagtatcagcaataagttgggacgtttgactttttgtaggtagacaaaaactaaactttttttcgcttctctatgtgtgcccctgggtagcgttccgttccgattggggtgcgaacgaatgaaatcgcccatcgagttgatacgtccatccatcgctagaaccgcgttcgctgtagaagactatataagagcagaggcaagagtagtgaaatgataggagccaagttctggggtcttagagctatgctggaaacagcatagcaagttaagataaggctagtccgttatcaacttgaaaaagtggcaccgagtcggtgctttttttggtggttgttcatcgattcctaatattgcagtgaagcagtttgttgtgcatggcgaagataaggttagggcgaggaatgccttggaaataagcggcactgggccgtatgaataaaaagcgttgaactttactacatgtagcatctactcaaaaacaaaatccacaaagtttactacacttttggtatgaataaaaaccttttcgaacatgtagtacctactactttaagaaaattctattcaaagtacagagtaatgctgcatgttaagaaaattccattcagagtgactcttgaaatcaataaaatcatgcatatatgccaaatttgtcacttattcacgtgacaaattatgtgaaaatatgaatattactacattcccgctatgcatcgcgtaatcgatcatgaaatttatgttggttatgtaactttacagtattccctttatgtgcatgtgaattttataatgatttgacaacaaggattttccttagaattttcgaattttagctagaaatctgtatcctatgaatgaatcttgagataacagcaattgtaacattataaagttcctaacattttcaagattccagtattgagtcgcgatcgcttaattaaccgcggatatgtcttgccgaagcacattaacccaagccatttatatatcaagtacaagttgatttgattctagtgatggactgacacgaatctatggcactgttgcagagcttacaaacaggtacccggagtcgcttcaattattcaatcatccattcaaaaacttccatctcttccaattagccaatattcaaattggaatccagccagccgacggaggcagatggtctacctggcaactatagagtttccatgtttccagactttccctcccggtaaacggagacaaaacgacagacgtaagtaggtacatatgcataccgcacggacaaatcaaatttgtctggcagctccaattagagtcgttaaaaatttaacgatgcgctaaataacttcaagctatttgtctcgctggattggcttcgagtggtaagatcctatcaaatgccgaaaacaaaaaactttcttcttaattgttcgttcttcaacacctctccatggtgataacggatacggtttcattgtcagcatccatcctccgaaaaatacattacgccttgaaatatgcaatcgcaaacacggatctgtttggaacatttattttactatgaagagatgcgataggtaatatttatttgagcgtttaagatactcattgttctctcaaagaatgtcattgaaagccaacgaggtcaaatcaaatattataataaaaaggtcaaagaggactaacttaaagctctctttatggataggaaaaaatattttcgcccatcgctagaacttttaccgtttccattgagtatataactaagatgaatgaggctaattgatgtctccgcaatacgccccgggtcttagagctatgctggaaacagcatagcaagttaagataaggctagtccgttatcaacttgaaaaagtggcaccgagtcggtgctttttttaagatgcttcggcaattaataataaggaatggtaaagcattcttcaaatgttactatgttctcaaattttcaagaattaggtattcaagaaattctttcaggcatattccataatctgcacaagcagctactttagaaattattgccgggcttaaattatatgtacaacatttcctgagtattttctgacaaaaattctcacaagggaaggtcacgatggagttacacggggtttttaaccggactatttttgttagattctacatgtcgaaatatgaaaaaccccaaagcctttcgggtgatggaccagtggtgtagccaggaggggctctgaaaggggtaattttgtacgtatattatattattaagctaattggaaatttgacaaaaatatttttttagtatttattgtgatggtagagaacaaaattgacattaatgtacgtttgaaatgtatttgccatgcctttggcgtactaacatggagtatggacaccaaaaccgatttcgctagcgtttaaacggcgcgccaattcgagctcgcccggggatctaattcaattagagactaattcaattagagctaattcaattaggatccaagcttatcgatttcgaaccctcgaccgccggagtataaatagaggcgcttcgtctacggagcgacaattcaattcaaacaagcaaagtgaacacgtcgctaagcgaaagctaagcaaataaacaagcgcagctgaacaagctaaacaatcggggtaccgctagagtcgacggtacgatccaccggtcgccaccatggtgagcaagggcgaggaggtcatcaaagagttcatgcgcttcaaggtgcgcatggagggctccatgaacggccacgagttcgagatcgagggcgagggcgagggccgcccctacgagggcacccagaccgccaagctgaaggtgaccaagggcggccccctgcccttcgcctgggacatcctgtccccccagttcatgtacggctccaaggcgtacgtgaagcaccccgccgacatccccgattacaagaagctgtccttccccgagggcttcaagtgggagcgcgtgatgaacttcgaggacggcggtctggtgaccgtgacccaggactcctccctgcaggacggcacgctgatctacaaggtgaagatgcgcggcaccaacttcccccccgacggccccgtaatgcagaagaagaccatgggctgggaggcctccaccgagcgcctgtacccccgcgacggcgtgctgaagggcgagatccaccaggccctgaagctgaaggacggcggccactacctggtggagttcaagaccatctacatggccaagaagcccgtgcaactgcccggctactactacgtggacaccaagctggacatcacctcccacaacgaggactacaccatcgtggaacagtacgagcgctccgagggccgccaccacctgttcctggggcatggcaccggcagcaccggcagcggcagctccggcaccgcctcctccgaggacaacaacatggccgttatcaaggaatttatgcgcttcaaagttaggatggagggatccatgaacggacatgagttcgagatcgagggagagggcgagggacgcccgtatgaaggcacacaaacagccaaactcaaggtcaccaagggcggaccactgcccttcgcctgggatatcctgagtccccagtttatgtacggcagcaaggcctacgttaagcaccccgctgacataccggactacaaaaagctgtcctttccggaaggcttcaagtgggagcgcgtgatgaatttcgaagacggaggactggtcactgtgacccaagatagcagtttgcaggacggtacactgatctataaggttaaaatgcgcggcactaactttccgccagatggcccagtgatgcagaagaagaccatgggttgggaggcatccaccgaacgtctgtaccctcgagacggagtgctcaagggcgagatccatcaggccctcaaactgaaagatggtggtcactacctggtcgaatttaagaccatttacatggccaagaagccggttcagctgcccggatattattatgtggatacgaaactggatataacttcgcataacgaagactacaccattgtcgagcagtatgagcgcagcgaaggccgacatcacctgttcctctacggcatggacgagctgtacaagtaggcggccgcgactctagatcataatcagccataccacatttgtagaggttttacttgctttaaaaaacctcccacacctccccctgaacctgaaacataaaatgaatgcaattgttgttgttaacttgtttattgcagcttataatggttacaaataaagcaatagcatcacaaatttcacaaataaagcatttttttcactgcattctagttgtggtttgtccaaactcatcaatgtatcttaaagcttctaggccggccgatctcggatctgacaatgttcagtgcagagactcggctacgcctcgtggactttgaagttgaccaacaatgtttattcttacctctaatagtcctctgtggcaaggtcaagattctgttagaagccaatgaagaacctggttgttcaataacattttgttcgtctaatatttcactaccgcttgacgttggctgcacttcatgtacctcatctataaacgcttcttctgtatcgctctggacgtcatcttcacttacgtgatctgatatttcactgtcagaatcctcaccaacaagctcgtcatcgctttgcagaagagcagagaggatatgctcatcgtctaaagaactacccattttattatatattagtcacgatatctataacaagaaaatatatatataataagttatcacgtaagtagaacatgaaataacaatataattatcgtatgagttaaatcttaaaagtcacgtaaaagataatcatgcgtcattttgactcacgcggtcgttatagttcaaaatcagtgacacttaccgcattgacaagcacgcctcacgggagctccaagcggcgactgagatgtcctaaatgcacagcgacggattcgcgctatttagaaagagagagcaatatttcaagaatgcatgcgtcaattttacgcagactatctttctagggttaaaaaagatttgcgctttactcgacctaaactttaaacacgtcatagaatcttcgtttgacaaaaaccacattgtggccaagctgtgtgacgcgacgcgcgctaaagaatggcaaaccaagtcgcgcgagcgtcgactctagaggatccccgggtaccgagctcgaattcgtaatcatggtcatagctgtttcctgtgtgaaattgttatccgctcacaattccacacaacatacgagccggaagcataaagtgtaaagcctggggtgcctaatgagtgagctaactcacattaattgcgttgcgctcactgcccgctttccagtcgggaaacctgtcgtgccagctgcattaatgaatcggccaacgcgcggggagaggcggtttgcgtattgggcgctcttccgcttcctcgctcactgactcgctgcgctcggtcgttcggctgcggcgagcggtatcagctcactcaaaggcggtaatacggt

SEQ ID NO: 43 - DNA, 13837 bp, Artificial Sequence
  pBac-U6(AAEL017774)-sgDsx1-U6(AAEL017774)-sgDsx5-U6(AAEL017774)-s gBTub3-U6(AAEL017763)-sgBTub2-LongScaffold-3_UTR-3xp3-tdTomato
tatccacagaatcaggggataacgcaggaaagaacatgtgagcaaaaggccagcaaaaggccaggaaccgtaaaaaggccgcgttgctggcgtttttccataggctccgcccccctgacgagcatcacaaaaatcgacgctcaagtcagaggtggcgaaacccgacaggactataaagataccaggcgtttccccctggaagctccctcgtgcgctctcctgttccgaccctgccgcttaccggatacctgtccgcctttctcccttcgggaagcgtggcgctttctcaatgctcacgctgtaggtatctcagttcggtgtaggtcgttcgctccaagctgggctgtgtgcacgaaccccccgttcagcccgaccgctgcgccttatccggtaactatcgtcttgagtccaacccggtaagacacgacttatcgccactggcagcagccactggtaacaggattagcagagcgaggtatgtaggcggtgctacagagttcttgaagtggtggcctaactacggctacactagaaggacagtatttggtatctgcgctctgctgaagccagttaccttcggaaaaagagttggtagctcttgatccggcaaacaaaccaccgctggtagcggtggtttttttgtttgcaagcagcagattacgcgcagaaaaaaaggatctcaagaagatcctttgatcttttctacggggtctgacgctcagtggaacgaaaactcacgttaagggattttggtcatgagattatcaaaaaggatcttcacctagatccttttaaattaaaaatgaagttttaaatcaatctaaagtatatatgagtaaacttggtctgacagttaccaatgcttaatcagtgaggcacctatctcagcgatctgtctatttcgttcatccatagttgcctgactccccgtcgtgtagataactacgatacgggagggcttaccatctggccccagtgctgcaatgataccgcgagacccacgctcaccggctccagatttatcagcaataaaccagccagccggaagggccgagcgcagaagtggtcctgcaactttatccgcctccatccagtctattaattgttgccgggaagctagagtaagtagttcgccagttaatagtttgcgcaacgttgttgccattgctacaggcatcgtggtgtcacgctcgtcgtttggtatggcttcattcagctccggttcccaacgatcaaggcgagttacatgatcccccatgttgtgcaaaaaagcggttagctccttcggtcctccgatcgttgtcagaagtaagttggccgcagtgttatcactcatggttatggcagcactgcataattctcttactgtcatgccatccgtaagatgcttttctgtgactggtgagtactcaaccaagtcattctgagaatagtgtatgcggcgaccgagttgctcttgcccggcgtcaatacgggataataccgcgccacatagcagaactttaaaagtgctcatcattggaaaacgttcttcggggcgaaaactctcaaggatcttaccgctgttgagatccagttcgatgtaacccactcgtgcacccaactgatcttcagcatcttttactttcaccagcgtttctgggtgagcaaaaacaggaaggcaaaatgccgcaaaaaagggaataagggcgacacggaaatgttgaatactcatactcttcctttttcaatattattgaagcatttatcagggttattgtctcatgagcggatacatatttgaatgtatttagaaaaataaacaaataggggttccgcgcacatttccccgaaaagtgccacctgacgtctaagaaaccattattatcatgacattaacctataaaaataggcgtatcacgaggccctttcgtctcgcgcgtttcggtgatgacggtgaaaacctctgacacatgcagctcccggagacggtcacagcttgtctgtaagcggatgccgggagcagacaagcccgtcagggcgcgtcagcgggtgttggcgggtgtcggggctggcttaactatgcggcatcagagcagattgtactgagagtgcaccatatgcggtgtgaaataccgcacagatgcgtaaggagaaaataccgcatcaggcgccattcgccattcaggctgcgcaactgttgggaagggcgatcggtgcgggcctcttcgctattacgccagctggcgaaagggggatgtgctgcaaggcgattaagttgggtaacgccagggttttcccagtcacgacgttgtaaaacgacggccagtgccaagctttgtttaaaatataacaaaattgtgatcccacaaaatgaagtggggcaaaatcaaataattaactagtgtccgtaaacttgttggtcttcaactttttgaggaacacgttggacggcaaatcgtgactataacacaagttgatttaataattttagccaacacgtcgggctgcgtgttttttgcgctctgtgtacacgttgattaactggtcgattaaataatttaatttttggttcttctttaaatctgtgatgaaattttttaaaataactttaaattcttcattggtaaaaaatgccacgttttgcaacttgtgagggtctaatatgaggtcaaactcagtaggagttttatccaaaaaagaaaacatgattacgtctgtacacgaacgcgtattaacgcagagtgcaaagtataagagggttaaaaaatatattttacgcaccatatacgcatcgggttgatatcgttaatatggatcaatttgaacagttgattaacgtgtctctgctcaagtctttgatcaaaacgcaaatcgacgaaaatgtgtcggacaatatcaagtcgatgagcgaaaaactaaaaaggctagaatacgacaatctcacagacagcgttgagatatacggtattcacgacagcaggctgaataataaaaaaattagaaactattatttaaccctagaaagataatcatattgtgacgtacgttaaagataatcatgcgtaaaattgacgcatgtgttttatcggtctgtatatcgaggtttatttattaatttgaatagatattaagttttattatatttacacttacatactaataataaattcaacaaacaatttatttatgtttatttatttattaaaaaaaaacaaaaactcaaaatttcttctataaagtaacaaaacttttaaacattctctcttttacaaaaataaacttattttgtactttaaaaacagtcatgttgtattataaaataagtaattagcttaacttatacataatagaaacaaattatacttattagtcagtcagaaacaactttggcacatatcaatattatgctctcgacaaataacttttttgcattttttgcacgatgcatttgcctttcgccttattttagaggggcagtaagtacagtaagtacgttttttcattactggctcttcagtactgtcatctgatgtaccaggcacttcatttggcaaaatattagagatattatcgcgcaaatatctcttcaaagtaggagcttctaaacgcttacgcataaacgatgacgtcaggctcatgtaaaggtttctcataaattttttgcgactttgaaccttttctcccttgctactgacattatggctgtatataataaaagaatttatgcaggcaatgtttatcattccgtacaataatgccataggccacctattcgtcttcctactgcaggtcatcacagaacacatttggtctagcgtgtccactccgcctttagtttgattataatacataaccatttgcggtttaccggtactttcgttgatagaagcatcctcatcacaagatgataataagtataccatcttagctggcttcggtttatatgagacgagagtaaggggtccgtcaaaacaaaacatcgatgttcccactggcctggagcgactgtttttcagtacttccggtatctcgcgtttgtttgatcgcacggttcccacaatggttaattcgagctcgcccgggctcctaggagatcttcatcacaaacgaaactattataatcgtcttcaggggaacggtagcatcatatctgtcaccagtcagtcggattcctttctttcggcataaattatgctcgggtgacgagacgagttgaaaatcccgtaaattaaaacatataccacactcgccgtcctagacgacgacgacgacgacgattcccaaggaattgaacccttcatttgcatttcactaccgctctgagagatgcaaagcgcgccagacagtcgatcgaatctgcagaccagagagtcacatcaagaatgttgacattccaccagaagactctaattattcttcgctcgactgggaaaactgttaacaactgctcgagtgtggtcggagcggctcacagtgcgttttcccgtagacaaaaatcaaatttcatggtatttttcggcgataaacagtaagttaaagggaacccgaatttagtgctatataatttaattccactagagtttgtatcctttgatagatacgcgtatttcgacctcaactgcaaggccgtcgtgtactagacttgactaatccagactggtcttttagttatgacttctgtccacatctccatacattcaacgcactgtgcggctgtgctgtgcgactccgtcgagtcgaccaacatagttgaaacaaattgaatatttaattgatcgttataggaatggtgttagatgagtcatcctttacagtaagcacatacagtattataattgaagatcgtcggcagataggtgtgtagggtagagtatcagcaataagttgggacgtttgactttttgtaggtagacaaaaactaaactttttttcgcttctctatgtgtgcccctgggtagcgttccgttccgattggggtgcgaacgaatgaaatcgcccatcgagttgatacgtccatccatcgctagaaccgcgttcgctgtagaagactatataagagcagaggcaagagtagtgaaatagcgacatgcagccattctggtcttagagctatgctggaaacagcatagcaagttaagataaggctagtccgttatcaacttgaaaaagtggcaccgagtcggtgctttttttggtggttgttcatcgattcctaatattgcagtgaagcagtttgttgtgcatggcgaagataaggttagggcgaggaatgccttggaaataagcggcactgggccgtatgaataaaaagcgttgaactttactacatgtagcatctactcaaaaacaaaatccacaaagtttactacacttttggtatgaataaaaaccttttcgaacatgtagtacctactactttaagaaaattctattcaaagtacagagtaatgctgcatgttaagaaaattccattcagagtgactcttgaaatcaataaaatcatgcatatatgccaaatttgtcacttattcacgtgacaaattatgtgaaaatatgaatattactacattcccgctatgcatcgcgtaatcgatcatgaaatttatgttggttatgtaactttacagtattccctttatgtgcatgtgaattttataatgatttgacaacaaggattttccttagaattttcgaattttagctagaaatctgtatcctatgaatgaatcttgagataacagcaattgtaacattataaagttcctaacattttcaagattccagtattgagtcgcgatcgcttaattaaccgcggtcatcacaaacgaaactattataatcgtcttcaggggaacggtagcatcatatctgtcaccagtcagtcggattcctttctttcggcataaattatgctcgggtgacgagacgagttgaaaatcccgtaaattaaaacatataccacactcgccgtcctagacgacgacgacgacgacgattcccaaggaattgaacccttcatttgcatttcactaccgctctgagagatgcaaagcgcgccagacagtcgatcgaatctgcagaccagagagtcacatcaagaatgttgacattccaccagaagactctaattattcttcgctcgactgggaaaactgttaacaactgctcgagtgtggtcggagcggctcacagtgcgttttcccgtagacaaaaatcaaatttcatggtatttttcggcgataaacagtaagttaaagggaacccgaatttagtgctatataatttaattccactagagtttgtatcctttgatagatacgcgtatttcgacctcaactgcaaggccgtcgtgtactagacttgactaatccagactggtcttttagttatgacttctgtccacatctccatacattcaacgcactgtgcggctgtgctgtgcgactccgtcgagtcgaccaacatagttgaaacaaattgaatatttaattgatcgttataggaatggtgttagatgagtcatcctttacagtaagcacatacagtattataattgaagatcgtcggcagataggtgtgtagggtagagtatcagcaataagttgggacgtttgactttttgtaggtagacaaaaactaaactttttttcgcttctctatgtgtgcccctgggtagcgttccgttccgattggggtgcgaacgaatgaaatcgcccatcgagttgatacgtccatccatcgctagaaccgcgttcgctgtagaagactatataagagcagaggcaagagtagtgaaatggatattggtacgacccggggtcttagagctatgctggaaacagcatagcaagttaagataaggctagtccgttatcaacttgaaaaagtggcaccgagtcggtgctttttttggtggttgttcatcgattcctaatattgcagtgaagcagtttgttgtgcatggcgaagataaggttagggcgaggaatgccttggaaataagcggcactgggccgtatgaataaaaagcgttgaactttactacatgtagcatctactcaaaaacaaaatccacaaagtttactacacttttggtatgaataaaaaccttttcgaacatgtagtacctactactttaagaaaattctattcaaagtacagagtaatgctgcatgttaagaaaattccattcagagtgactcttgaaatcaataaaatcatgcatatatgccaaatttgtcacttattcacgtgacaaattatgtgaaaatatgaatattactacattcccgctatgcatcgcgtaatcgatcatgaaatttatgttggttatgtaactttacagtattccctttatgtgcatgtgaattttataatgatttgacaacaaggattttccttagaattttcgaattttagctagaaatctgtatcctatgaatgaatcttgagataacagcaattgtaacattataaagttcctaacattttcaagattccagtattgaggccttttgggcccatttaaatcttaagtcatcacaaacgaaactattataatcgtcttcaggggaacggtagcatcatatctgtcaccagtcagtcggattcctttctttcggcataaattatgctcgggtgacgagacgagttgaaaatcccgtaaattaaaacatataccacactcgccgtcctagacgacgacgacgacgacgattcccaaggaattgaacccttcatttgcatttcactaccgctctgagagatgcaaagcgcgccagacagtcgatcgaatctgcagaccagagagtcacatcaagaatgttgacattccaccagaagactctaattattcttcgctcgactgggaaaactgttaacaactgctcgagtgtggtcggagcggctcacagtgcgttttcccgtagacaaaaatcaaatttcatggtatttttcggcgataaacagtaagttaaagggaacccgaatttagtgctatataatttaattccactagagtttgtatcctttgatagatacgcgtatttcgacctcaactgcaaggccgtcgtgtactagacttgactaatccagactggtcttttagttatgacttctgtccacatctccatacattcaacgcactgtgcggctgtgctgtgcgactccgtcgagtcgaccaacatagttgaaacaaattgaatatttaattgatcgttataggaatggtgttagatgagtcatcctttacagtaagcacatacagtattataattgaagatcgtcggcagataggtgtgtagggtagagtatcagcaataagttgggacgtttgactttttgtaggtagacaaaaactaaactttttttcgcttctctatgtgtgcccctgggtagcgttccgttccgattggggtgcgaacgaatgaaatcgcccatcgagttgatacgtccatccatcgctagaaccgcgttcgctgtagaagactatataagagcagaggcaagagtagtgaaatgataggagccaagttctggggtcttagagctatgctggaaacagcatagcaagttaagataaggctagtccgttatcaacttgaaaaagtggcaccgagtcggtgctttttttggtggttgttcatcgattcctaatattgcagtgaagcagtttgttgtgcatggcgaagataaggttagggcgaggaatgccttggaaataagcggcactgggccgtatgaataaaaagcgttgaactttactacatgtagcatctactcaaaaacaaaatccacaaagtttactacacttttggtatgaataaaaaccttttcgaacatgtagtacctactactttaagaaaattctattcaaagtacagagtaatgctgcatgttaagaaaattccattcagagtgactcttgaaatcaataaaatcatgcatatatgccaaatttgtcacttattcacgtgacaaattatgtgaaaatatgaatattactacattcccgctatgcatcgcgtaatcgatcatgaaatttatgttggttatgtaactttacagtattccctttatgtgcatgtgaattttataatgatttgacaacaaggattttccttagaattttcgaattttagctagaaatctgtatcctatgaatgaatcttgagataacagcaattgtaacattataaagttcctaacattttcaagattccagtattgagtcgcgatcgcttaattaaccgcggatatgtcttgccgaagcacattaacccaagccatttatatatcaagtacaagttgatttgattctagtgatggactgacacgaatctatggcactgttgcagagcttacaaacaggtacccggagtcgcttcaattattcaatcatccattcaaaaacttccatctcttccaattagccaatattcaaattggaatccagccagccgacggaggcagatggtctacctggcaactatagagtttccatgtttccagactttccctcccggtaaacggagacaaaacgacagacgtaagtaggtacatatgcataccgcacggacaaatcaaatttgtctggcagctccaattagagtcgttaaaaatttaacgatgcgctaaataacttcaagctatttgtctcgctggattggcttcgagtggtaagatcctatcaaatgccgaaaacaaaaaactttcttcttaattgttcgttcttcaacacctctccatggtgataacggatacggtttcattgtcagcatccatcctccgaaaaatacattacgccttgaaatatgcaatcgcaaacacggatctgtttggaacatttattttactatgaagagatgcgataggtaatatttatttgagcgtttaagatactcattgttctctcaaagaatgtcattgaaagccaacgaggtcaaatcaaatattataataaaaaggtcaaagaggactaacttaaagctctctttatggataggaaaaaatattttcgcccatcgctagaacttttaccgtttccattgagtatataactaagatgaatgaggctaattgatgtctccgcaatacgccccgggtcttagagctatgctggaaacagcatagcaagttaagataaggctagtccgttatcaacttgaaaaagtggcaccgagtcggtgctttttttaagatgcttcggcaattaataataaggaatggtaaagcattcttcaaatgttactatgttctcaaattttcaagaattaggtattcaagaaattctttcaggcatattccataatctgcacaagcagctactttagaaattattgccgggcttaaattatatgtacaacatttcctgagtattttctgacaaaaattctcacaagggaaggtcacgatggagttacacggggtttttaaccggactatttttgttagattctacatgtcgaaatatgaaaaaccccaaagcctttcgggtgatggaccagtggtgtagccaggaggggctctgaaaggggtaattttgtacgtatattatattattaagctaattggaaatttgacaaaaatatttttttagtatttattgtgatggtagagaacaaaattgacattaatgtacgtttgaaatgtatttgccatgcctttggcgtactaacatggagtatggacaccaaaaccgatttcgctagcgtttaaacggcgcgccaattcgagctcgcccggggatctaattcaattagagactaattcaattagagctaattcaattaggatccaagcttatcgatttcgaaccctcgaccgccggagtataaatagaggcgcttcgtctacggagcgacaattcaattcaaacaagcaaagtgaacacgtcgctaagcgaaagctaagcaaataaacaagcgcagctgaacaagctaaacaatcggggtaccgctagagtcgacggtacgatccaccggtcgccaccatggtgagcaagggcgaggaggtcatcaaagagttcatgcgcttcaaggtgcgcatggagggctccatgaacggccacgagttcgagatcgagggcgagggcgagggccgcccctacgagggcacccagaccgccaagctgaaggtgaccaagggcggccccctgcccttcgcctgggacatcctgtccccccagttcatgtacggctccaaggcgtacgtgaagcaccccgccgacatccccgattacaagaagctgtccttccccgagggcttcaagtgggagcgcgtgatgaacttcgaggacggcggtctggtgaccgtgacccaggactcctccctgcaggacggcacgctgatctacaaggtgaagatgcgcggcaccaacttcccccccgacggccccgtaatgcagaagaagaccatgggctgggaggcctccaccgagcgcctgtacccccgcgacggcgtgctgaagggcgagatccaccaggccctgaagctgaaggacggcggccactacctggtggagttcaagaccatctacatggccaagaagcccgtgcaactgcccggctactactacgtggacaccaagctggacatcacctcccacaacgaggactacaccatcgtggaacagtacgagcgctccgagggccgccaccacctgttcctggggcatggcaccggcagcaccggcagcggcagctccggcaccgcctcctccgaggacaacaacatggccgttatcaaggaatttatgcgcttcaaagttaggatggagggatccatgaacggacatgagttcgagatcgagggagagggcgagggacgcccgtatgaaggcacacaaacagccaaactcaaggtcaccaagggcggaccactgcccttcgcctgggatatcctgagtccccagtttatgtacggcagcaaggcctacgttaagcaccccgctgacataccggactacaaaaagctgtcctttccggaaggcttcaagtgggagcgcgtgatgaatttcgaagacggaggactggtcactgtgacccaagatagcagtttgcaggacggtacactgatctataaggttaaaatgcgcggcactaactttccgccagatggcccagtgatgcagaagaagaccatgggttgggaggcatccaccgaacgtctgtaccctcgagacggagtgctcaagggcgagatccatcaggccctcaaactgaaagatggtggtcactacctggtcgaatttaagaccatttacatggccaagaagccggttcagctgcccggatattattatgtggatacgaaactggatataacttcgcataacgaagactacaccattgtcgagcagtatgagcgcagcgaaggccgacatcacctgttcctctacggcatggacgagctgtacaagtaggcggccgcgactctagatcataatcagccataccacatttgtagaggttttacttgctttaaaaaacctcccacacctccccctgaacctgaaacataaaatgaatgcaattgttgttgttaacttgtttattgcagcttataatggttacaaataaagcaatagcatcacaaatttcacaaataaagcatttttttcactgcattctagttgtggtttgtccaaactcatcaatgtatcttaaagcttctaggccggccgatctcggatctgacaatgttcagtgcagagactcggctacgcctcgtggactttgaagttgaccaacaatgtttattcttacctctaatagtcctctgtggcaaggtcaagattctgttagaagccaatgaagaacctggttgttcaataacattttgttcgtctaatatttcactaccgcttgacgttggctgcacttcatgtacctcatctataaacgcttcttctgtatcgctctggacgtcatcttcacttacgtgatctgatatttcactgtcagaatcctcaccaacaagctcgtcatcgctttgcagaagagcagagaggatatgctcatcgtctaaagaactacccattttattatatattagtcacgatatctataacaagaaaatatatatataataagttatcacgtaagtagaacatgaaataacaatataattatcgtatgagttaaatcttaaaagtcacgtaaaagataatcatgcgtcattttgactcacgcggtcgttatagttcaaaatcagtgacacttaccgcattgacaagcacgcctcacgggagctccaagcggcgactgagatgtcctaaatgcacagcgacggattcgcgctatttagaaagagagagcaatatttcaagaatgcatgcgtcaattttacgcagactatctttctagggttaaaaaagatttgcgctttactcgacctaaactttaaacacgtcatagaatcttcgtttgacaaaaaccacattgtggccaagctgtgtgacgcgacgcgcgctaaagaatggcaaaccaagtcgcgcgagcgtcgactctagaggatccccgggtaccgagctcgaattcgtaatcatggtcatagctgtttcctgtgtgaaattgttatccgctcacaattccacacaacatacgagccggaagcataaagtgtaaagcctggggtgcctaatgagtgagctaactcacattaattgcgttgcgctcactgcccgctttccagtcgggaaacctgtcgtgccagctgcattaatgaatcggccaacgcgcggggagaggcggtttgcgtattgggcgctcttccgcttcctcgctcactgactcgctgcgctcggtcgttcggctgcggcgagcggtatcagctcactcaaaggcggtaatacggt

SEQ ID NO: 44 - DNA, 13569 bp, Artificial Sequence
  pBac-U6(AAEL017774)-sgBTub3-U6(AAEL017763)-sgBTub2-LongScaffold-3 _UTR-3xp3-tdTomato-U6(AAEL017774)-sgDsx1-U6(AAEL017763)-sgDsx1
tatccacagaatcaggggataacgcaggaaagaacatgtgagcaaaaggccagcaaaaggccaggaaccgtaaaaaggccgcgttgctggcgtttttccataggctccgcccccctgacgagcatcacaaaaatcgacgctcaagtcagaggtggcgaaacccgacaggactataaagataccaggcgtttccccctggaagctccctcgtgcgctctcctgttccgaccctgccgcttaccggatacctgtccgcctttctcccttcgggaagcgtggcgctttctcaatgctcacgctgtaggtatctcagttcggtgtaggtcgttcgctccaagctgggctgtgtgcacgaaccccccgttcagcccgaccgctgcgccttatccggtaactatcgtcttgagtccaacccggtaagacacgacttatcgccactggcagcagccactggtaacaggattagcagagcgaggtatgtaggcggtgctacagagttcttgaagtggtggcctaactacggctacactagaaggacagtatttggtatctgcgctctgctgaagccagttaccttcggaaaaagagttggtagctcttgatccggcaaacaaaccaccgctggtagcggtggtttttttgtttgcaagcagcagattacgcgcagaaaaaaaggatctcaagaagatcctttgatcttttctacggggtctgacgctcagtggaacgaaaactcacgttaagggattttggtcatgagattatcaaaaaggatcttcacctagatccttttaaattaaaaatgaagttttaaatcaatctaaagtatatatgagtaaacttggtctgacagttaccaatgcttaatcagtgaggcacctatctcagcgatctgtctatttcgttcatccatagttgcctgactccccgtcgtgtagataactacgatacgggagggcttaccatctggccccagtgctgcaatgataccgcgagacccacgctcaccggctccagatttatcagcaataaaccagccagccggaagggccgagcgcagaagtggtcctgcaactttatccgcctccatccagtctattaattgttgccgggaagctagagtaagtagttcgccagttaatagtttgcgcaacgttgttgccattgctacaggcatcgtggtgtcacgctcgtcgtttggtatggcttcattcagctccggttcccaacgatcaaggcgagttacatgatcccccatgttgtgcaaaaaagcggttagctccttcggtcctccgatcgttgtcagaagtaagttggccgcagtgttatcactcatggttatggcagcactgcataattctcttactgtcatgccatccgtaagatgcttttctgtgactggtgagtactcaaccaagtcattctgagaatagtgtatgcggcgaccgagttgctcttgcccggcgtcaatacgggataataccgcgccacatagcagaactttaaaagtgctcatcattggaaaacgttcttcggggcgaaaactctcaaggatcttaccgctgttgagatccagttcgatgtaacccactcgtgcacccaactgatcttcagcatcttttactttcaccagcgtttctgggtgagcaaaaacaggaaggcaaaatgccgcaaaaaagggaataagggcgacacggaaatgttgaatactcatactcttcctttttcaatattattgaagcatttatcagggttattgtctcatgagcggatacatatttgaatgtatttagaaaaataaacaaataggggttccgcgcacatttccccgaaaagtgccacctgacgtctaagaaaccattattatcatgacattaacctataaaaataggcgtatcacgaggccctttcgtctcgcgcgtttcggtgatgacggtgaaaacctctgacacatgcagctcccggagacggtcacagcttgtctgtaagcggatgccgggagcagacaagcccgtcagggcgcgtcagcgggtgttggcgggtgtcggggctggcttaactatgcggcatcagagcagattgtactgagagtgcaccatatgcggtgtgaaataccgcacagatgcgtaaggagaaaataccgcatcaggcgccattcgccattcaggctgcgcaactgttgggaagggcgatcggtgcgggcctcttcgctattacgccagctggcgaaagggggatgtgctgcaaggcgattaagttgggtaacgccagggttttcccagtcacgacgttgtaaaacgacggccagtgccaagctttgtttaaaatataacaaaattgtgatcccacaaaatgaagtggggcaaaatcaaataattaactagtgtccgtaaacttgttggtcttcaactttttgaggaacacgttggacggcaaatcgtgactataacacaagttgatttaataattttagccaacacgtcgggctgcgtgttttttgcgctctgtgtacacgttgattaactggtcgattaaataatttaatttttggttcttctttaaatctgtgatgaaattttttaaaataactttaaattcttcattggtaaaaaatgccacgttttgcaacttgtgagggtctaatatgaggtcaaactcagtaggagttttatccaaaaaagaaaacatgattacgtctgtacacgaacgcgtattaacgcagagtgcaaagtataagagggttaaaaaatatattttacgcaccatatacgcatcgggttgatatcgttaatatggatcaatttgaacagttgattaacgtgtctctgctcaagtctttgatcaaaacgcaaatcgacgaaaatgtgtcggacaatatcaagtcgatgagcgaaaaactaaaaaggctagaatacgacaatctcacagacagcgttgagatatacggtattcacgacagcaggctgaataataaaaaaattagaaactattatttaaccctagaaagataatcatattgtgacgtacgttaaagataatcatgcgtaaaattgacgcatgtgttttatcggtctgtatatcgaggtttatttattaatttgaatagatattaagttttattatatttacacttacatactaataataaattcaacaaacaatttatttatgtttatttatttattaaaaaaaaacaaaaactcaaaatttcttctataaagtaacaaaacttttaaacattctctcttttacaaaaataaacttattttgtactttaaaaacagtcatgttgtattataaaataagtaattagcttaacttatacataatagaaacaaattatacttattagtcagtcagaaacaactttggcacatatcaatattatgctctcgacaaataacttttttgcattttttgcacgatgcatttgcctttcgccttattttagaggggcagtaagtacagtaagtacgttttttcattactggctcttcagtactgtcatctgatgtaccaggcacttcatttggcaaaatattagagatattatcgcgcaaatatctcttcaaagtaggagcttctaaacgcttacgcataaacgatgacgtcaggctcatgtaaaggtttctcataaattttttgcgactttgaaccttttctcccttgctactgacattatggctgtatataataaaagaatttatgcaggcaatgtttatcattccgtacaataatgccataggccacctattcgtcttcctactgcaggtcatcacagaacacatttggtctagcgtgtccactccgcctttagtttgattataatacataaccatttgcggtttaccggtactttcgttgatagaagcatcctcatcacaagatgataataagtataccatcttagctggcttcggtttatatgagacgagagtaaggggtccgtcaaaacaaaacatcgatgttcccactggcctggagcgactgtttttcagtacttccggtatctcgcgtttgtttgatcgcacggttcccacaatggttaattcgagctcgcccgggctcctaggagatcttcatcacaaacgaaactattataatcgtcttcaggggaacggtagcatcatatctgtcaccagtcagtcggattcctttctttcggcataaattatgctcgggtgacgagacgagttgaaaatcccgtaaattaaaacatataccacactcgccgtcctagacgacgacgacgacgacgattcccaaggaattgaacccttcatttgcatttcactaccgctctgagagatgcaaagcgcgccagacagtcgatcgaatctgcagaccagagagtcacatcaagaatgttgacattccaccagaagactctaattattcttcgctcgactgggaaaactgttaacaactgctcgagtgtggtcggagcggctcacagtgcgttttcccgtagacaaaaatcaaatttcatggtatttttcggcgataaacagtaagttaaagggaacccgaatttagtgctatataatttaattccactagagtttgtatcctttgatagatacgcgtatttcgacctcaactgcaaggccgtcgtgtactagacttgactaatccagactggtcttttagttatgacttctgtccacatctccatacattcaacgcactgtgcggctgtgctgtgcgactccgtcgagtcgaccaacatagttgaaacaaattgaatatttaattgatcgttataggaatggtgttagatgagtcatcctttacagtaagcacatacagtattataattgaagatcgtcggcagataggtgtgtagggtagagtatcagcaataagttgggacgtttgactttttgtaggtagacaaaaactaaactttttttcgcttctctatgtgtgcccctgggtagcgttccgttccgattggggtgcgaacgaatgaaatcgcccatcgagttgatacgtccatccatcgctagaaccgcgttcgctgtagaagactatataagagcagaggcaagagtagtgaaatgataggagccaagttctggggtcttagagctatgctggaaacagcatagcaagttaagataaggctagtccgttatcaacttgaaaaagtggcaccgagtcggtgctttttttggtggttgttcatcgattcctaatattgcagtgaagcagtttgttgtgcatggcgaagataaggttagggcgaggaatgccttggaaataagcggcactgggccgtatgaataaaaagcgttgaactttactacatgtagcatctactcaaaaacaaaatccacaaagtttactacacttttggtatgaataaaaaccttttcgaacatgtagtacctactactttaagaaaattctattcaaagtacagagtaatgctgcatgttaagaaaattccattcagagtgactcttgaaatcaataaaatcatgcatatatgccaaatttgtcacttattcacgtgacaaattatgtgaaaatatgaatattactacattcccgctatgcatcgcgtaatcgatcatgaaatttatgttggttatgtaactttacagtattccctttatgtgcatgtgaattttataatgatttgacaacaaggattttccttagaattttcgaattttagctagaaatctgtatcctatgaatgaatcttgagataacagcaattgtaacattataaagttcctaacattttcaagattccagtattgagtcgcgatcgcttaattaaccgcggatatgtcttgccgaagcacattaacccaagccatttatatatcaagtacaagttgatttgattctagtgatggactgacacgaatctatggcactgttgcagagcttacaaacaggtacccggagtcgcttcaattattcaatcatccattcaaaaacttccatctcttccaattagccaatattcaaattggaatccagccagccgacggaggcagatggtctacctggcaactatagagtttccatgtttccagactttccctcccggtaaacggagacaaaacgacagacgtaagtaggtacatatgcataccgcacggacaaatcaaatttgtctggcagctccaattagagtcgttaaaaatttaacgatgcgctaaataacttcaagctatttgtctcgctggattggcttcgagtggtaagatcctatcaaatgccgaaaacaaaaaactttcttcttaattgttcgttcttcaacacctctccatggtgataacggatacggtttcattgtcagcatccatcctccgaaaaatacattacgccttgaaatatgcaatcgcaaacacggatctgtttggaacatttattttactatgaagagatgcgataggtaatatttatttgagcgtttaagatactcattgttctctcaaagaatgtcattgaaagccaacgaggtcaaatcaaatattataataaaaaggtcaaagaggactaacttaaagctctctttatggataggaaaaaatattttcgcccatcgctagaacttttaccgtttccattgagtatataactaagatgaatgaggctaattgatgtctccgcaatacgccccgggtcttagagctatgctggaaacagcatagcaagttaagataaggctagtccgttatcaacttgaaaaagtggcaccgagtcggtgctttttttaagatgcttcggcaattaataataaggaatggtaaagcattcttcaaatgttactatgttctcaaattttcaagaattaggtattcaagaaattctttcaggcatattccataatctgcacaagcagctactttagaaattattgccgggcttaaattatatgtacaacatttcctgagtattttctgacaaaaattctcacaagggaaggtcacgatggagttacacggggtttttaaccggactatttttgttagattctacatgtcgaaatatgaaaaaccccaaagcctttcgggtgatggaccagtggtgtagccaggaggggctctgaaaggggtaattttgtacgtatattatattattaagctaattggaaatttgacaaaaatatttttttagtatttattgtgatggtagagaacaaaattgacattaatgtacgtttgaaatgtatttgccatgcctttggcgtactaacatggagtatggacaccaaaaccgatttcggccttttgggcccggcgcgccaattcgagctcgcccggggatctaattcaattagagactaattcaattagagctaattcaattaggatccaagcttatcgatttcgaaccctcgaccgccggagtataaatagaggcgcttcgtctacggagcgacaattcaattcaaacaagcaaagtgaacacgtcgctaagcgaaagctaagcaaataaacaagcgcagctgaacaagctaaacaatcggggtaccgctagagtcgacggtacgatccaccggtcgccaccatggtgagcaagggcgaggaggtcatcaaagagttcatgcgcttcaaggtgcgcatggagggctccatgaacggccacgagttcgagatcgagggcgagggcgagggccgcccctacgagggcacccagaccgccaagctgaaggtgaccaagggcggccccctgcccttcgcctgggacatcctgtccccccagttcatgtacggctccaaggcgtacgtgaagcaccccgccgacatccccgattacaagaagctgtccttccccgagggcttcaagtgggagcgcgtgatgaacttcgaggacggcggtctggtgaccgtgacccaggactcctccctgcaggacggcacgctgatctacaaggtgaagatgcgcggcaccaacttcccccccgacggccccgtaatgcagaagaagaccatgggctgggaggcctccaccgagcgcctgtacccccgcgacggcgtgctgaagggcgagatccaccaggccctgaagctgaaggacggcggccactacctggtggagttcaagaccatctacatggccaagaagcccgtgcaactgcccggctactactacgtggacaccaagctggacatcacctcccacaacgaggactacaccatcgtggaacagtacgagcgctccgagggccgccaccacctgttcctggggcatggcaccggcagcaccggcagcggcagctccggcaccgcctcctccgaggacaacaacatggccgttatcaaggaatttatgcgcttcaaagttaggatggagggatccatgaacggacatgagttcgagatcgagggagagggcgagggacgcccgtatgaaggcacacaaacagccaaactcaaggtcaccaagggcggaccactgcccttcgcctgggatatcctgagtccccagtttatgtacggcagcaaggcctacgttaagcaccccgctgacataccggactacaaaaagctgtcctttccggaaggcttcaagtgggagcgcgtgatgaatttcgaagacggaggactggtcactgtgacccaagatagcagtttgcaggacggtacactgatctataaggttaaaatgcgcggcactaactttccgccagatggcccagtgatgcagaagaagaccatgggttgggaggcatccaccgaacgtctgtaccctcgagacggagtgctcaagggcgagatccatcaggccctcaaactgaaagatggtggtcactacctggtcgaatttaagaccatttacatggccaagaagccggttcagctgcccggatattattatgtggatacgaaactggatataacttcgcataacgaagactacaccattgtcgagcagtatgagcgcagcgaaggccgacatcacctgttcctctacggcatggacgagctgtacaagtaggcggccgcgactctagatcataatcagccataccacatttgtagaggttttacttgctttaaaaaacctcccacacctccccctgaacctgaaacataaaatgaatgcaattgttgttgttaacttgtttattgcagcttataatggttacaaataaagcaatagcatcacaaatttcacaaataaagcatttttttcactgcattctagttgtggtttgtccaaactcatcaatgtatcttaaagcttgctagctcatcacaaacgaaactattataatcgtcttcaggggaacggtagcatcatatctgtcaccagtcagtcggattcctttctttcggcataaattatgctcgggtgacgagacgagttgaaaatcccgtaaattaaaacatataccacactcgccgtcctagacgacgacgacgacgacgattcccaaggaattgaacccttcatttgcatttcactaccgctctgagagatgcaaagcgcgccagacagtcgatcgaatctgcagaccagagagtcacatcaagaatgttgacattccaccagaagactctaattattcttcgctcgactgggaaaactgttaacaactgctcgagtgtggtcggagcggctcacagtgcgttttcccgtagacaaaaatcaaatttcatggtatttttcggcgataaacagtaagttaaagggaacccgaatttagtgctatataatttaattccactagagtttgtatcctttgatagatacgcgtatttcgacctcaactgcaaggccgtcgtgtactagacttgactaatccagactggtcttttagttatgacttctgtccacatctccatacattcaacgcactgtgcggctgtgctgtgcgactccgtcgagtcgaccaacatagttgaaacaaattgaatatttaattgatcgttataggaatggtgttagatgagtcatcctttacagtaagcacatacagtattataattgaagatcgtcggcagataggtgtgtagggtagagtatcagcaataagttgggacgtttgactttttgtaggtagacaaaaactaaactttttttcgcttctctatgtgtgcccctgggtagcgttccgttccgattggggtgcgaacgaatgaaatcgcccatcgagttgatacgtccatccatcgctagaaccgcgttcgctgtagaagactatataagagcagaggcaagagtagtgaaatagcgacatgcagccattctggtcttagagctatgctggaaacagcatagcaagttaagataaggctagtccgttatcaacttgaaaaagtggcaccgagtcggtgctttttttggtggttgttcatcgattcctaatattgcagtgaagcagtttgttgtgcatggcgaagataaggttagggcgaggaatgccttggaaataagcggcactgggccgtatgaataaaaagcgttgaactttactacatgtagcatctactcaaaaacaaaatccacaaagtttactacacttttggtatgaataaaaaccttttcgaacatgtagtacctactactttaagaaaattctattcaaagtacagagtaatgctgcatgttaagaaaattccattcagagtgactcttgaaatcaataaaatcatgcatatatgccaaatttgtcacttattcacgtgacaaattatgtgaaaatatgaatattactacattcccgctatgcatcgcgtaatcgatcatgaaatttatgttggttatgtaactttacagtattccctttatgtgcatgtgaattttataatgatttgacaacaaggattttccttagaattttcgaattttagctagaaatctgtatcctatgaatgaatcttgagataacagcaattgtaacattataaagttcctaacattttcaagattccagtattgagtcgcgatcgcttaattaaccgcggatatgtcttgccgaagcacattaacccaagccatttatatatcaagtacaagttgatttgattctagtgatggactgacacgaatctatggcactgttgcagagcttacaaacaggtacccggagtcgcttcaattattcaatcatccattcaaaaacttccatctcttccaattagccaatattcaaattggaatccagccagccgacggaggcagatggtctacctggcaactatagagtttccatgtttccagactttccctcccggtaaacggagacaaaacgacagacgtaagtaggtacatatgcataccgcacggacaaatcaaatttgtctggcagctccaattagagtcgttaaaaatttaacgatgcgctaaataacttcaagctatttgtctcgctggattggcttcgagtggtaagatcctatcaaatgccgaaaacaaaaaactttcttcttaattgttcgttcttcaacacctctccatggtgataacggatacggtttcattgtcagcatccatcctccgaaaaatacattacgccttgaaatatgcaatcgcaaacacggatctgtttggaacatttattttactatgaagagatgcgataggtaatatttatttgagcgtttaagatactcattgttctctcaaagaatgtcattgaaagccaacgaggtcaaatcaaatattataataaaaaggtcaaagaggactaacttaaagctctctttatggataggaaaaaatattttcgcccatcgctagaacttttaccgtttccattgagtatataactaagatgaatgaggctaattgatagcgacatgcagccattctggtcttagagctatgctggaaacagcatagcaagttaagataaggctagtccgttatcaacttgaaaaagtggcaccgagtcggtgctttttttaagatgcttcggcaattaataataaggaatggtaaagcattcttcaaatgttactatgttctcaaattttcaagaattaggtattcaagaaattctttcaggcatattccataatctgcacaagcagctactttagaaattattgccgggcttaaattatatgtacaacatttcctgagtattttctgacaaaaattctcacaagggaaggtcacgatggagttacacggggtttttaaccggactatttttgttagattctacatgtcgaaatatgaaaaaccccaaagcctttcgggtgatggaccagtggtgtagccaggaggggctctgaaaggggtaattttgtacgtatattatattattaagctaattggaaatttgacaaaaatatttttttagtatttattgtgatggtagagaacaaaattgacattaatgtacgtttgaaatgtatttgccatgcctttggcgtactaacatggagtatggacaccaaaaccgatttcgtttaaacgatctcggatctgacaatgttcagtgcagagactcggctacgcctcgtggactttgaagttgaccaacaatgtttattcttacctctaatagtcctctgtggcaaggtcaagattctgttagaagccaatgaagaacctggttgttcaataacattttgttcgtctaatatttcactaccgcttgacgttggctgcacttcatgtacctcatctataaacgcttcttctgtatcgctctggacgtcatcttcacttacgtgatctgatatttcactgtcagaatcctcaccaacaagctcgtcatcgctttgcagaagagcagagaggatatgctcatcgtctaaagaactacccattttattatatattagtcacgatatctataacaagaaaatatatatataataagttatcacgtaagtagaacatgaaataacaatataattatcgtatgagttaaatcttaaaagtcacgtaaaagataatcatgcgtcattttgactcacgcggtcgttatagttcaaaatcagtgacacttaccgcattgacaagcacgcctcacgggagctccaagcggcgactgagatgtcctaaatgcacagcgacggattcgcgctatttagaaagagagagcaatatttcaagaatgcatgcgtcaattttacgcagactatctttctagggttaaaaaagatttgcgctttactcgacctaaactttaaacacgtcatagaatcttcgtttgacaaaaaccacattgtggccaagctgtgtgacgcgacgcgcgctaaagaatggcaaaccaagtcgcgcgagcgtcgactctagaggatccccgggtaccgagctcgaattcgtaatcatggtcatagctgtttcctgtgtgaaattgttatccgctcacaattccacacaacatacgagccggaagcataaagtgtaaagcctggggtgcctaatgagtgagctaactcacattaattgcgttgcgctcactgcccgctttccagtcgggaaacctgtcgtgccagctgcattaatgaatcggccaacgcgcggggagaggcggtttgcgtattgggcgctcttccgcttcctcgctcactgactcgctgcgctcggtcgttcggctgcggcgagcggtatcagctcactcaaaggcggtaatacggt

SEQ ID NO: 45 - DNA, 13569 bp, Artificial Sequence
  pBac-U6(AAEL017774)-sgZpg3-U6(AAEL017763)-sgZpg4-LongScaffold-3_U TR-3xp3-tdTomato-U6(AAEL017774)-sgDsx1-U6(AAEL017763)-sgDsx1
tatccacagaatcaggggataacgcaggaaagaacatgtgagcaaaaggccagcaaaaggccaggaaccgtaaaaaggccgcgttgctggcgtttttccataggctccgcccccctgacgagcatcacaaaaatcgacgctcaagtcagaggtggcgaaacccgacaggactataaagataccaggcgtttccccctggaagctccctcgtgcgctctcctgttccgaccctgccgcttaccggatacctgtccgcctttctcccttcgggaagcgtggcgctttctcaatgctcacgctgtaggtatctcagttcggtgtaggtcgttcgctccaagctgggctgtgtgcacgaaccccccgttcagcccgaccgctgcgccttatccggtaactatcgtcttgagtccaacccggtaagacacgacttatcgccactggcagcagccactggtaacaggattagcagagcgaggtatgtaggcggtgctacagagttcttgaagtggtggcctaactacggctacactagaaggacagtatttggtatctgcgctctgctgaagccagttaccttcggaaaaagagttggtagctcttgatccggcaaacaaaccaccgctggtagcggtggtttttttgtttgcaagcagcagattacgcgcagaaaaaaaggatctcaagaagatcctttgatcttttctacggggtctgacgctcagtggaacgaaaactcacgttaagggattttggtcatgagattatcaaaaaggatcttcacctagatccttttaaattaaaaatgaagttttaaatcaatctaaagtatatatgagtaaacttggtctgacagttaccaatgcttaatcagtgaggcacctatctcagcgatctgtctatttcgttcatccatagttgcctgactccccgtcgtgtagataactacgatacgggagggcttaccatctggccccagtgctgcaatgataccgcgagacccacgctcaccggctccagatttatcagcaataaaccagccagccggaagggccgagcgcagaagtggtcctgcaactttatccgcctccatccagtctattaattgttgccgggaagctagagtaagtagttcgccagttaatagtttgcgcaacgttgttgccattgctacaggcatcgtggtgtcacgctcgtcgtttggtatggcttcattcagctccggttcccaacgatcaaggcgagttacatgatcccccatgttgtgcaaaaaagcggttagctccttcggtcctccgatcgttgtcagaagtaagttggccgcagtgttatcactcatggttatggcagcactgcataattctcttactgtcatgccatccgtaagatgcttttctgtgactggtgagtactcaaccaagtcattctgagaatagtgtatgcggcgaccgagttgctcttgcccggcgtcaatacgggataataccgcgccacatagcagaactttaaaagtgctcatcattggaaaacgttcttcggggcgaaaactctcaaggatcttaccgctgttgagatccagttcgatgtaacccactcgtgcacccaactgatcttcagcatcttttactttcaccagcgtttctgggtgagcaaaaacaggaaggcaaaatgccgcaaaaaagggaataagggcgacacggaaatgttgaatactcatactcttcctttttcaatattattgaagcatttatcagggttattgtctcatgagcggatacatatttgaatgtatttagaaaaataaacaaataggggttccgcgcacatttccccgaaaagtgccacctgacgtctaagaaaccattattatcatgacattaacctataaaaataggcgtatcacgaggccctttcgtctcgcgcgtttcggtgatgacggtgaaaacctctgacacatgcagctcccggagacggtcacagcttgtctgtaagcggatgccgggagcagacaagcccgtcagggcgcgtcagcgggtgttggcgggtgtcggggctggcttaactatgcggcatcagagcagattgtactgagagtgcaccatatgcggtgtgaaataccgcacagatgcgtaaggagaaaataccgcatcaggcgccattcgccattcaggctgcgcaactgttgggaagggcgatcggtgcgggcctcttcgctattacgccagctggcgaaagggggatgtgctgcaaggcgattaagttgggtaacgccagggttttcccagtcacgacgttgtaaaacgacggccagtgccaagctttgtttaaaatataacaaaattgtgatcccacaaaatgaagtggggcaaaatcaaataattaactagtgtccgtaaacttgttggtcttcaactttttgaggaacacgttggacggcaaatcgtgactataacacaagttgatttaataattttagccaacacgtcgggctgcgtgttttttgcgctctgtgtacacgttgattaactggtcgattaaataatttaatttttggttcttctttaaatctgtgatgaaattttttaaaataactttaaattcttcattggtaaaaaatgccacgttttgcaacttgtgagggtctaatatgaggtcaaactcagtaggagttttatccaaaaaagaaaacatgattacgtctgtacacgaacgcgtattaacgcagagtgcaaagtataagagggttaaaaaatatattttacgcaccatatacgcatcgggttgatatcgttaatatggatcaatttgaacagttgattaacgtgtctctgctcaagtctttgatcaaaacgcaaatcgacgaaaatgtgtcggacaatatcaagtcgatgagcgaaaaactaaaaaggctagaatacgacaatctcacagacagcgttgagatatacggtattcacgacagcaggctgaataataaaaaaattagaaactattatttaaccctagaaagataatcatattgtgacgtacgttaaagataatcatgcgtaaaattgacgcatgtgttttatcggtctgtatatcgaggtttatttattaatttgaatagatattaagttttattatatttacacttacatactaataataaattcaacaaacaatttatttatgtttatttatttattaaaaaaaaacaaaaactcaaaatttcttctataaagtaacaaaacttttaaacattctctcttttacaaaaataaacttattttgtactttaaaaacagtcatgttgtattataaaataagtaattagcttaacttatacataatagaaacaaattatacttattagtcagtcagaaacaactttggcacatatcaatattatgctctcgacaaataacttttttgcattttttgcacgatgcatttgcctttcgccttattttagaggggcagtaagtacagtaagtacgttttttcattactggctcttcagtactgtcatctgatgtaccaggcacttcatttggcaaaatattagagatattatcgcgcaaatatctcttcaaagtaggagcttctaaacgcttacgcataaacgatgacgtcaggctcatgtaaaggtttctcataaattttttgcgactttgaaccttttctcccttgctactgacattatggctgtatataataaaagaatttatgcaggcaatgtttatcattccgtacaataatgccataggccacctattcgtcttcctactgcaggtcatcacagaacacatttggtctagcgtgtccactccgcctttagtttgattataatacataaccatttgcggtttaccggtactttcgttgatagaagcatcctcatcacaagatgataataagtataccatcttagctggcttcggtttatatgagacgagagtaaggggtccgtcaaaacaaaacatcgatgttcccactggcctggagcgactgtttttcagtacttccggtatctcgcgtttgtttgatcgcacggttcccacaatggttaattcgagctcgcccgggctcctaggagatcttcatcacaaacgaaactattataatcgtcttcaggggaacggtagcatcatatctgtcaccagtcagtcggattcctttctttcggcataaattatgctcgggtgacgagacgagttgaaaatcccgtaaattaaaacatataccacactcgccgtcctagacgacgacgacgacgacgattcccaaggaattgaacccttcatttgcatttcactaccgctctgagagatgcaaagcgcgccagacagtcgatcgaatctgcagaccagagagtcacatcaagaatgttgacattccaccagaagactctaattattcttcgctcgactgggaaaactgttaacaactgctcgagtgtggtcggagcggctcacagtgcgttttcccgtagacaaaaatcaaatttcatggtatttttcggcgataaacagtaagttaaagggaacccgaatttagtgctatataatttaattccactagagtttgtatcctttgatagatacgcgtatttcgacctcaactgcaaggccgtcgtgtactagacttgactaatccagactggtcttttagttatgacttctgtccacatctccatacattcaacgcactgtgcggctgtgctgtgcgactccgtcgagtcgaccaacatagttgaaacaaattgaatatttaattgatcgttataggaatggtgttagatgagtcatcctttacagtaagcacatacagtattataattgaagatcgtcggcagataggtgtgtagggtagagtatcagcaataagttgggacgtttgactttttgtaggtagacaaaaactaaactttttttcgcttctctatgtgtgcccctgggtagcgttccgttccgattggggtgcgaacgaatgaaatcgcccatcgagttgatacgtccatccatcgctagaaccgcgttcgctgtagaagactatataagagcagaggcaagagtagtgaaattcatcaagaacatgttcagggtcttagagctatgctggaaacagcatagcaagttaagataaggctagtccgttatcaacttgaaaaagtggcaccgagtcggtgctttttttggtggttgttcatcgattcctaatattgcagtgaagcagtttgttgtgcatggcgaagataaggttagggcgaggaatgccttggaaataagcggcactgggccgtatgaataaaaagcgttgaactttactacatgtagcatctactcaaaaacaaaatccacaaagtttactacacttttggtatgaataaaaaccttttcgaacatgtagtacctactactttaagaaaattctattcaaagtacagagtaatgctgcatgttaagaaaattccattcagagtgactcttgaaatcaataaaatcatgcatatatgccaaatttgtcacttattcacgtgacaaattatgtgaaaatatgaatattactacattcccgctatgcatcgcgtaatcgatcatgaaatttatgttggttatgtaactttacagtattccctttatgtgcatgtgaattttataatgatttgacaacaaggattttccttagaattttcgaattttagctagaaatctgtatcctatgaatgaatcttgagataacagcaattgtaacattataaagttcctaacattttcaagattccagtattgagtcgcgatcgcttaattaaccgcggatatgtcttgccgaagcacattaacccaagccatttatatatcaagtacaagttgatttgattctagtgatggactgacacgaatctatggcactgttgcagagcttacaaacaggtacccggagtcgcttcaattattcaatcatccattcaaaaacttccatctcttccaattagccaatattcaaattggaatccagccagccgacggaggcagatggtctacctggcaactatagagtttccatgtttccagactttccctcccggtaaacggagacaaaacgacagacgtaagtaggtacatatgcataccgcacggacaaatcaaatttgtctggcagctccaattagagtcgttaaaaatttaacgatgcgctaaataacttcaagctatttgtctcgctggattggcttcgagtggtaagatcctatcaaatgccgaaaacaaaaaactttcttcttaattgttcgttcttcaacacctctccatggtgataacggatacggtttcattgtcagcatccatcctccgaaaaatacattacgccttgaaatatgcaatcgcaaacacggatctgtttggaacatttattttactatgaagagatgcgataggtaatatttatttgagcgtttaagatactcattgttctctcaaagaatgtcattgaaagccaacgaggtcaaatcaaatattataataaaaaggtcaaagaggactaacttaaagctctctttatggataggaaaaaatattttcgcccatcgctagaacttttaccgtttccattgagtatataactaagatgaatgaggctaattgatacagttggaaccgaacgctggtcttagagctatgctggaaacagcatagcaagttaagataaggctagtccgttatcaacttgaaaaagtggcaccgagtcggtgctttttttaagatgcttcggcaattaataataaggaatggtaaagcattcttcaaatgttactatgttctcaaattttcaagaattaggtattcaagaaattctttcaggcatattccataatctgcacaagcagctactttagaaattattgccgggcttaaattatatgtacaacatttcctgagtattttctgacaaaaattctcacaagggaaggtcacgatggagttacacggggtttttaaccggactatttttgttagattctacatgtcgaaatatgaaaaaccccaaagcctttcgggtgatggaccagtggtgtagccaggaggggctctgaaaggggtaattttgtacgtatattatattattaagctaattggaaatttgacaaaaatatttttttagtatttattgtgatggtagagaacaaaattgacattaatgtacgtttgaaatgtatttgccatgcctttggcgtactaacatggagtatggacaccaaaaccgatttcggccttttgggcccggcgcgccaattcgagctcgcccggggatctaattcaattagagactaattcaattagagctaattcaattaggatccaagcttatcgatttcgaaccctcgaccgccggagtataaatagaggcgcttcgtctacggagcgacaattcaattcaaacaagcaaagtgaacacgtcgctaagcgaaagctaagcaaataaacaagcgcagctgaacaagctaaacaatcggggtaccgctagagtcgacggtacgatccaccggtcgccaccatggtgagcaagggcgaggaggtcatcaaagagttcatgcgcttcaaggtgcgcatggagggctccatgaacggccacgagttcgagatcgagggcgagggcgagggccgcccctacgagggcacccagaccgccaagctgaaggtgaccaagggcggccccctgcccttcgcctgggacatcctgtccccccagttcatgtacggctccaaggcgtacgtgaagcaccccgccgacatccccgattacaagaagctgtccttccccgagggcttcaagtgggagcgcgtgatgaacttcgaggacggcggtctggtgaccgtgacccaggactcctccctgcaggacggcacgctgatctacaaggtgaagatgcgcggcaccaacttcccccccgacggccccgtaatgcagaagaagaccatgggctgggaggcctccaccgagcgcctgtacccccgcgacggcgtgctgaagggcgagatccaccaggccctgaagctgaaggacggcggccactacctggtggagttcaagaccatctacatggccaagaagcccgtgcaactgcccggctactactacgtggacaccaagctggacatcacctcccacaacgaggactacaccatcgtggaacagtacgagcgctccgagggccgccaccacctgttcctggggcatggcaccggcagcaccggcagcggcagctccggcaccgcctcctccgaggacaacaacatggccgttatcaaggaatttatgcgcttcaaagttaggatggagggatccatgaacggacatgagttcgagatcgagggagagggcgagggacgcccgtatgaaggcacacaaacagccaaactcaaggtcaccaagggcggaccactgcccttcgcctgggatatcctgagtccccagtttatgtacggcagcaaggcctacgttaagcaccccgctgacataccggactacaaaaagctgtcctttccggaaggcttcaagtgggagcgcgtgatgaatttcgaagacggaggactggtcactgtgacccaagatagcagtttgcaggacggtacactgatctataaggttaaaatgcgcggcactaactttccgccagatggcccagtgatgcagaagaagaccatgggttgggaggcatccaccgaacgtctgtaccctcgagacggagtgctcaagggcgagatccatcaggccctcaaactgaaagatggtggtcactacctggtcgaatttaagaccatttacatggccaagaagccggttcagctgcccggatattattatgtggatacgaaactggatataacttcgcataacgaagactacaccattgtcgagcagtatgagcgcagcgaaggccgacatcacctgttcctctacggcatggacgagctgtacaagtaggcggccgcgactctagatcataatcagccataccacatttgtagaggttttacttgctttaaaaaacctcccacacctccccctgaacctgaaacataaaatgaatgcaattgttgttgttaacttgtttattgcagcttataatggttacaaataaagcaatagcatcacaaatttcacaaataaagcatttttttcactgcattctagttgtggtttgtccaaactcatcaatgtatcttaaagcttgctagctcatcacaaacgaaactattataatcgtcttcaggggaacggtagcatcatatctgtcaccagtcagtcggattcctttctttcggcataaattatgctcgggtgacgagacgagttgaaaatcccgtaaattaaaacatataccacactcgccgtcctagacgacgacgacgacgacgattcccaaggaattgaacccttcatttgcatttcactaccgctctgagagatgcaaagcgcgccagacagtcgatcgaatctgcagaccagagagtcacatcaagaatgttgacattccaccagaagactctaattattcttcgctcgactgggaaaactgttaacaactgctcgagtgtggtcggagcggctcacagtgcgttttcccgtagacaaaaatcaaatttcatggtatttttcggcgataaacagtaagttaaagggaacccgaatttagtgctatataatttaattccactagagtttgtatcctttgatagatacgcgtatttcgacctcaactgcaaggccgtcgtgtactagacttgactaatccagactggtcttttagttatgacttctgtccacatctccatacattcaacgcactgtgcggctgtgctgtgcgactccgtcgagtcgaccaacatagttgaaacaaattgaatatttaattgatcgttataggaatggtgttagatgagtcatcctttacagtaagcacatacagtattataattgaagatcgtcggcagataggtgtgtagggtagagtatcagcaataagttgggacgtttgactttttgtaggtagacaaaaactaaactttttttcgcttctctatgtgtgcccctgggtagcgttccgttccgattggggtgcgaacgaatgaaatcgcccatcgagttgatacgtccatccatcgctagaaccgcgttcgctgtagaagactatataagagcagaggcaagagtagtgaaatagcgacatgcagccattctggtcttagagctatgctggaaacagcatagcaagttaagataaggctagtccgttatcaacttgaaaaagtggcaccgagtcggtgctttttttggtggttgttcatcgattcctaatattgcagtgaagcagtttgttgtgcatggcgaagataaggttagggcgaggaatgccttggaaataagcggcactgggccgtatgaataaaaagcgttgaactttactacatgtagcatctactcaaaaacaaaatccacaaagtttactacacttttggtatgaataaaaaccttttcgaacatgtagtacctactactttaagaaaattctattcaaagtacagagtaatgctgcatgttaagaaaattccattcagagtgactcttgaaatcaataaaatcatgcatatatgccaaatttgtcacttattcacgtgacaaattatgtgaaaatatgaatattactacattcccgctatgcatcgcgtaatcgatcatgaaatttatgttggttatgtaactttacagtattccctttatgtgcatgtgaattttataatgatttgacaacaaggattttccttagaattttcgaattttagctagaaatctgtatcctatgaatgaatcttgagataacagcaattgtaacattataaagttcctaacattttcaagattccagtattgagtcgcgatcgcttaattaaccgcggatatgtcttgccgaagcacattaacccaagccatttatatatcaagtacaagttgatttgattctagtgatggactgacacgaatctatggcactgttgcagagcttacaaacaggtacccggagtcgcttcaattattcaatcatccattcaaaaacttccatctcttccaattagccaatattcaaattggaatccagccagccgacggaggcagatggtctacctggcaactatagagtttccatgtttccagactttccctcccggtaaacggagacaaaacgacagacgtaagtaggtacatatgcataccgcacggacaaatcaaatttgtctggcagctccaattagagtcgttaaaaatttaacgatgcgctaaataacttcaagctatttgtctcgctggattggcttcgagtggtaagatcctatcaaatgccgaaaacaaaaaactttcttcttaattgttcgttcttcaacacctctccatggtgataacggatacggtttcattgtcagcatccatcctccgaaaaatacattacgccttgaaatatgcaatcgcaaacacggatctgtttggaacatttattttactatgaagagatgcgataggtaatatttatttgagcgtttaagatactcattgttctctcaaagaatgtcattgaaagccaacgaggtcaaatcaaatattataataaaaaggtcaaagaggactaacttaaagctctctttatggataggaaaaaatattttcgcccatcgctagaacttttaccgtttccattgagtatataactaagatgaatgaggctaattgatagcgacatgcagccattctggtcttagagctatgctggaaacagcatagcaagttaagataaggctagtccgttatcaacttgaaaaagtggcaccgagtcggtgctttttttaagatgcttcggcaattaataataaggaatggtaaagcattcttcaaatgttactatgttctcaaattttcaagaattaggtattcaagaaattctttcaggcatattccataatctgcacaagcagctactttagaaattattgccgggcttaaattatatgtacaacatttcctgagtattttctgacaaaaattctcacaagggaaggtcacgatggagttacacggggtttttaaccggactatttttgttagattctacatgtcgaaatatgaaaaaccccaaagcctttcgggtgatggaccagtggtgtagccaggaggggctctgaaaggggtaattttgtacgtatattatattattaagctaattggaaatttgacaaaaatatttttttagtatttattgtgatggtagagaacaaaattgacattaatgtacgtttgaaatgtatttgccatgcctttggcgtactaacatggagtatggacaccaaaaccgatttcgtttaaacgatctcggatctgacaatgttcagtgcagagactcggctacgcctcgtggactttgaagttgaccaacaatgtttattcttacctctaatagtcctctgtggcaaggtcaagattctgttagaagccaatgaagaacctggttgttcaataacattttgttcgtctaatatttcactaccgcttgacgttggctgcacttcatgtacctcatctataaacgcttcttctgtatcgctctggacgtcatcttcacttacgtgatctgatatttcactgtcagaatcctcaccaacaagctcgtcatcgctttgcagaagagcagagaggatatgctcatcgtctaaagaactacccattttattatatattagtcacgatatctataacaagaaaatatatatataataagttatcacgtaagtagaacatgaaataacaatataattatcgtatgagttaaatcttaaaagtcacgtaaaagataatcatgcgtcattttgactcacgcggtcgttatagttcaaaatcagtgacacttaccgcattgacaagcacgcctcacgggagctccaagcggcgactgagatgtcctaaatgcacagcgacggattcgcgctatttagaaagagagagcaatatttcaagaatgcatgcgtcaattttacgcagactatctttctagggttaaaaaagatttgcgctttactcgacctaaactttaaacacgtcatagaatcttcgtttgacaaaaaccacattgtggccaagctgtgtgacgcgacgcgcgctaaagaatggcaaaccaagtcgcgcgagcgtcgactctagaggatccccgggtaccgagctcgaattcgtaatcatggtcatagctgtttcctgtgtgaaattgttatccgctcacaattccacacaacatacgagccggaagcataaagtgtaaagcctggggtgcctaatgagtgagctaactcacattaattgcgttgcgctcactgcccgctttccagtcgggaaacctgtcgtgccagctgcattaatgaatcggccaacgcgcggggagaggcggtttgcgtattgggcgctcttccgcttcctcgctcactgactcgctgcgctcggtcgttcggctgcggcgagcggtatcagctcactcaaaggcggtaatacggt

SEQ ID NO: 46 - DNA, 16751 bp, Artificial Sequence
  pBac-U6(AAEL017774)-sgDsx1-U6(AAEL017763)-sgDsx2-U6(AAEL017774)-s gDsx3-U6(AAEL017763)-sgDsx4-LongScaffold-3_UTR-3xp3-tdTomato-v3- U6(AAEL017774)-sgBTub3-U6(AAEL017763)-sgBTub2
tatccacagaatcaggggataacgcaggaaagaacatgtgagcaaaaggccagcaaaaggccaggaaccgtaaaaaggccgcgttgctggcgtttttccataggctccgcccccctgacgagcatcacaaaaatcgacgctcaagtcagaggtggcgaaacccgacaggactataaagataccaggcgtttccccctggaagctccctcgtgcgctctcctgttccgaccctgccgcttaccggatacctgtccgcctttctcccttcgggaagcgtggcgctttctcaatgctcacgctgtaggtatctcagttcggtgtaggtcgttcgctccaagctgggctgtgtgcacgaaccccccgttcagcccgaccgctgcgccttatccggtaactatcgtcttgagtccaacccggtaagacacgacttatcgccactggcagcagccactggtaacaggattagcagagcgaggtatgtaggcggtgctacagagttcttgaagtggtggcctaactacggctacactagaaggacagtatttggtatctgcgctctgctgaagccagttaccttcggaaaaagagttggtagctcttgatccggcaaacaaaccaccgctggtagcggtggtttttttgtttgcaagcagcagattacgcgcagaaaaaaaggatctcaagaagatcctttgatcttttctacggggtctgacgctcagtggaacgaaaactcacgttaagggattttggtcatgagattatcaaaaaggatcttcacctagatccttttaaattaaaaatgaagttttaaatcaatctaaagtatatatgagtaaacttggtctgacagttaccaatgcttaatcagtgaggcacctatctcagcgatctgtctatttcgttcatccatagttgcctgactccccgtcgtgtagataactacgatacgggagggcttaccatctggccccagtgctgcaatgataccgcgagacccacgctcaccggctccagatttatcagcaataaaccagccagccggaagggccgagcgcagaagtggtcctgcaactttatccgcctccatccagtctattaattgttgccgggaagctagagtaagtagttcgccagttaatagtttgcgcaacgttgttgccattgctacaggcatcgtggtgtcacgctcgtcgtttggtatggcttcattcagctccggttcccaacgatcaaggcgagttacatgatcccccatgttgtgcaaaaaagcggttagctccttcggtcctccgatcgttgtcagaagtaagttggccgcagtgttatcactcatggttatggcagcactgcataattctcttactgtcatgccatccgtaagatgcttttctgtgactggtgagtactcaaccaagtcattctgagaatagtgtatgcggcgaccgagttgctcttgcccggcgtcaatacgggataataccgcgccacatagcagaactttaaaagtgctcatcattggaaaacgttcttcggggcgaaaactctcaaggatcttaccgctgttgagatccagttcgatgtaacccactcgtgcacccaactgatcttcagcatcttttactttcaccagcgtttctgggtgagcaaaaacaggaaggcaaaatgccgcaaaaaagggaataagggcgacacggaaatgttgaatactcatactcttcctttttcaatattattgaagcatttatcagggttattgtctcatgagcggatacatatttgaatgtatttagaaaaataaacaaataggggttccgcgcacatttccccgaaaagtgccacctgacgtctaagaaaccattattatcatgacattaacctataaaaataggcgtatcacgaggccctttcgtctcgcgcgtttcggtgatgacggtgaaaacctctgacacatgcagctcccggagacggtcacagcttgtctgtaagcggatgccgggagcagacaagcccgtcagggcgcgtcagcgggtgttggcgggtgtcggggctggcttaactatgcggcatcagagcagattgtactgagagtgcaccatatgcggtgtgaaataccgcacagatgcgtaaggagaaaataccgcatcaggcgccattcgccattcaggctgcgcaactgttgggaagggcgatcggtgcgggcctcttcgctattacgccagctggcgaaagggggatgtgctgcaaggcgattaagttgggtaacgccagggttttcccagtcacgacgttgtaaaacgacggccagtgccaagctttgtttaaaatataacaaaattgtgatcccacaaaatgaagtggggcaaaatcaaataattaactagtgtccgtaaacttgttggtcttcaactttttgaggaacacgttggacggcaaatcgtgactataacacaagttgatttaataattttagccaacacgtcgggctgcgtgttttttgcgctctgtgtacacgttgattaactggtcgattaaataatttaatttttggttcttctttaaatctgtgatgaaattttttaaaataactttaaattcttcattggtaaaaaatgccacgttttgcaacttgtgagggtctaatatgaggtcaaactcagtaggagttttatccaaaaaagaaaacatgattacgtctgtacacgaacgcgtattaacgcagagtgcaaagtataagagggttaaaaaatatattttacgcaccatatacgcatcgggttgatatcgttaatatggatcaatttgaacagttgattaacgtgtctctgctcaagtctttgatcaaaacgcaaatcgacgaaaatgtgtcggacaatatcaagtcgatgagcgaaaaactaaaaaggctagaatacgacaatctcacagacagcgttgagatatacggtattcacgacagcaggctgaataataaaaaaattagaaactattatttaaccctagaaagataatcatattgtgacgtacgttaaagataatcatgcgtaaaattgacgcatgtgttttatcggtctgtatatcgaggtttatttattaatttgaatagatattaagttttattatatttacacttacatactaataataaattcaacaaacaatttatttatgtttatttatttattaaaaaaaaacaaaaactcaaaatttcttctataaagtaacaaaacttttaaacattctctcttttacaaaaataaacttattttgtactttaaaaacagtcatgttgtattataaaataagtaattagcttaacttatacataatagaaacaaattatacttattagtcagtcagaaacaactttggcacatatcaatattatgctctcgacaaataacttttttgcattttttgcacgatgcatttgcctttcgccttattttagaggggcagtaagtacagtaagtacgttttttcattactggctcttcagtactgtcatctgatgtaccaggcacttcatttggcaaaatattagagatattatcgcgcaaatatctcttcaaagtaggagcttctaaacgcttacgcataaacgatgacgtcaggctcatgtaaaggtttctcataaattttttgcgactttgaaccttttctcccttgctactgacattatggctgtatataataaaagaatttatgcaggcaatgtttatcattccgtacaataatgccataggccacctattcgtcttcctactgcaggtcatcacagaacacatttggtctagcgtgtccactccgcctttagtttgattataatacataaccatttgcggtttaccggtactttcgttgatagaagcatcctcatcacaagatgataataagtataccatcttagctggcttcggtttatatgagacgagagtaaggggtccgtcaaaacaaaacatcgatgttcccactggcctggagcgactgtttttcagtacttccggtatctcgcgtttgtttgatcgcacggttcccacaatggttaattcgagctcgcccgggctcctaggagatcttcatcacaaacgaaactattataatcgtcttcaggggaacggtagcatcatatctgtcaccagtcagtcggattcctttctttcggcataaattatgctcgggtgacgagacgagttgaaaatcccgtaaattaaaacatataccacactcgccgtcctagacgacgacgacgacgacgattcccaaggaattgaacccttcatttgcatttcactaccgctctgagagatgcaaagcgcgccagacagtcgatcgaatctgcagaccagagagtcacatcaagaatgttgacattccaccagaagactctaattattcttcgctcgactgggaaaactgttaacaactgctcgagtgtggtcggagcggctcacagtgcgttttcccgtagacaaaaatcaaatttcatggtatttttcggcgataaacagtaagttaaagggaacccgaatttagtgctatataatttaattccactagagtttgtatcctttgatagatacgcgtatttcgacctcaactgcaaggccgtcgtgtactagacttgactaatccagactggtcttttagttatgacttctgtccacatctccatacattcaacgcactgtgcggctgtgctgtgcgactccgtcgagtcgaccaacatagttgaaacaaattgaatatttaattgatcgttataggaatggtgttagatgagtcatcctttacagtaagcacatacagtattataattgaagatcgtcggcagataggtgtgtagggtagagtatcagcaataagttgggacgtttgactttttgtaggtagacaaaaactaaactttttttcgcttctctatgtgtgcccctgggtagcgttccgttccgattggggtgcgaacgaatgaaatcgcccatcgagttgatacgtccatccatcgctagaaccgcgttcgctgtagaagactatataagagcagaggcaagagtagtgaaatagcgacatgcagccattctggtcttagagctatgctggaaacagcatagcaagttaagataaggctagtccgttatcaacttgaaaaagtggcaccgagtcggtgctttttttggtggttgttcatcgattcctaatattgcagtgaagcagtttgttgtgcatggcgaagataaggttagggcgaggaatgccttggaaataagcggcactgggccgtatgaataaaaagcgttgaactttactacatgtagcatctactcaaaaacaaaatccacaaagtttactacacttttggtatgaataaaaaccttttcgaacatgtagtacctactactttaagaaaattctattcaaagtacagagtaatgctgcatgttaagaaaattccattcagagtgactcttgaaatcaataaaatcatgcatatatgccaaatttgtcacttattcacgtgacaaattatgtgaaaatatgaatattactacattcccgctatgcatcgcgtaatcgatcatgaaatttatgttggttatgtaactttacagtattccctttatgtgcatgtgaattttataatgatttgacaacaaggattttccttagaattttcgaattttagctagaaatctgtatcctatgaatgaatcttgagataacagcaattgtaacattataaagttcctaacattttcaagattccagtattgagtcgcgatcgcttaattaaccgcggatatgtcttgccgaagcacattaacccaagccatttatatatcaagtacaagttgatttgattctagtgatggactgacacgaatctatggcactgttgcagagcttacaaacaggtacccggagtcgcttcaattattcaatcatccattcaaaaacttccatctcttccaattagccaatattcaaattggaatccagccagccgacggaggcagatggtctacctggcaactatagagtttccatgtttccagactttccctcccggtaaacggagacaaaacgacagacgtaagtaggtacatatgcataccgcacggacaaatcaaatttgtctggcagctccaattagagtcgttaaaaatttaacgatgcgctaaataacttcaagctatttgtctcgctggattggcttcgagtggtaagatcctatcaaatgccgaaaacaaaaaactttcttcttaattgttcgttcttcaacacctctccatggtgataacggatacggtttcattgtcagcatccatcctccgaaaaatacattacgccttgaaatatgcaatcgcaaacacggatctgtttggaacatttattttactatgaagagatgcgataggtaatatttatttgagcgtttaagatactcattgttctctcaaagaatgtcattgaaagccaacgaggtcaaatcaaatattataataaaaaggtcaaagaggactaacttaaagctctctttatggataggaaaaaatattttcgcccatcgctagaacttttaccgtttccattgagtatataactaagatgaatgaggctaattgatctcacaagtagagctacacggtcttagagctatgctggaaacagcatagcaagttaagataaggctagtccgttatcaacttgaaaaagtggcaccgagtcggtgctttttttaagatgcttcggcaattaataataaggaatggtaaagcattcttcaaatgttactatgttctcaaattttcaagaattaggtattcaagaaattctttcaggcatattccataatctgcacaagcagctactttagaaattattgccgggcttaaattatatgtacaacatttcctgagtattttctgacaaaaattctcacaagggaaggtcacgatggagttacacggggtttttaaccggactatttttgttagattctacatgtcgaaatatgaaaaaccccaaagcctttcgggtgatggaccagtggtgtagccaggaggggctctgaaaggggtaattttgtacgtatattatattattaagctaattggaaatttgacaaaaatatttttttagtatttattgtgatggtagagaacaaaattgacattaatgtacgtttgaaatgtatttgccatgcctttggcgtactaacatggagtatggacaccaaaaccgatttcgctagcgtttaaactcatcacaaacgaaactattataatcgtcttcaggggaacggtagcatcatatctgtcaccagtcagtcggattcctttctttcggcataaattatgctcgggtgacgagacgagttgaaaatcccgtaaattaaaacatataccacactcgccgtcctagacgacgacgacgacgacgattcccaaggaattgaacccttcatttgcatttcactaccgctctgagagatgcaaagcgcgccagacagtcgatcgaatctgcagaccagagagtcacatcaagaatgttgacattccaccagaagactctaattattcttcgctcgactgggaaaactgttaacaactgctcgagtgtggtcggagcggctcacagtgcgttttcccgtagacaaaaatcaaatttcatggtatttttcggcgataaacagtaagttaaagggaacccgaatttagtgctatataatttaattccactagagtttgtatcctttgatagatacgcgtatttcgacctcaactgcaaggccgtcgtgtactagacttgactaatccagactggtcttttagttatgacttctgtccacatctccatacattcaacgcactgtgcggctgtgctgtgcgactccgtcgagtcgaccaacatagttgaaacaaattgaatatttaattgatcgttataggaatggtgttagatgagtcatcctttacagtaagcacatacagtattataattgaagatcgtcggcagataggtgtgtagggtagagtatcagcaataagttgggacgtttgactttttgtaggtagacaaaaactaaactttttttcgcttctctatgtgtgcccctgggtagcgttccgttccgattggggtgcgaacgaatgaaatcgcccatcgagttgatacgtccatccatcgctagaaccgcgttcgctgtagaagactatataagagcagaggcaagagtagtgaaatggtagctggccgttgccaaagtcttagagctatgctggaaacagcatagcaagttaagataaggctagtccgttatcaacttgaaaaagtggcaccgagtcggtgctttttttggtggttgttcatcgattcctaatattgcagtgaagcagtttgttgtgcatggcgaagataaggttagggcgaggaatgccttggaaataagcggcactgggccgtatgaataaaaagcgttgaactttactacatgtagcatctactcaaaaacaaaatccacaaagtttactacacttttggtatgaataaaaaccttttcgaacatgtagtacctactactttaagaaaattctattcaaagtacagagtaatgctgcatgttaagaaaattccattcagagtgactcttgaaatcaataaaatcatgcatatatgccaaatttgtcacttattcacgtgacaaattatgtgaaaatatgaatattactacattcccgctatgcatcgcgtaatcgatcatgaaatttatgttggttatgtaactttacagtattccctttatgtgcatgtgaattttataatgatttgacaacaaggattttccttagaattttcgaattttagctagaaatctgtatcctatgaatgaatcttgagataacagcaattgtaacattataaagttcctaacattttcaagattccagtattgagtcgcgatcgcttaattaaccgcggatatgtcttgccgaagcacattaacccaagccatttatatatcaagtacaagttgatttgattctagtgatggactgacacgaatctatggcactgttgcagagcttacaaacaggtacccggagtcgcttcaattattcaatcatccattcaaaaacttccatctcttccaattagccaatattcaaattggaatccagccagccgacggaggcagatggtctacctggcaactatagagtttccatgtttccagactttccctcccggtaaacggagacaaaacgacagacgtaagtaggtacatatgcataccgcacggacaaatcaaatttgtctggcagctccaattagagtcgttaaaaatttaacgatgcgctaaataacttcaagctatttgtctcgctggattggcttcgagtggtaagatcctatcaaatgccgaaaacaaaaaactttcttcttaattgttcgttcttcaacacctctccatggtgataacggatacggtttcattgtcagcatccatcctccgaaaaatacattacgccttgaaatatgcaatcgcaaacacggatctgtttggaacatttattttactatgaagagatgcgataggtaatatttatttgagcgtttaagatactcattgttctctcaaagaatgtcattgaaagccaacgaggtcaaatcaaatattataataaaaaggtcaaagaggactaacttaaagctctctttatggataggaaaaaatattttcgcccatcgctagaacttttaccgtttccattgagtatataactaagatgaatgaggctaattgatctgtcgtcgtttttttccgggtcttagagctatgctggaaacagcatagcaagttaagataaggctagtccgttatcaacttgaaaaagtggcaccgagtcggtgctttttttaagatgcttcggcaattaataataaggaatggtaaagcattcttcaaatgttactatgttctcaaattttcaagaattaggtattcaagaaattctttcaggcatattccataatctgcacaagcagctactttagaaattattgccgggcttaaattatatgtacaacatttcctgagtattttctgacaaaaattctcacaagggaaggtcacgatggagttacacggggtttttaaccggactatttttgttagattctacatgtcgaaatatgaaaaaccccaaagcctttcgggtgatggaccagtggtgtagccaggaggggctctgaaaggggtaattttgtacgtatattatattattaagctaattggaaatttgacaaaaatatttttttagtatttattgtgatggtagagaacaaaattgacattaatgtacgtttgaaatgtatttgccatgcctttggcgtactaacatggagtatggacaccaaaaccgatttcggccttttgggcccggcgcgccaattcgagctcgcccggggatctaattcaattagagactaattcaattagagctaattcaattaggatccaagcttatcgatttcgaaccctcgaccgccggagtataaatagaggcgcttcgtctacggagcgacaattcaattcaaacaagcaaagtgaacacgtcgctaagcgaaagctaagcaaataaacaagcgcagctgaacaagctaaacaatcggggtaccgctagagtcgacggtacgatccaccggtcgccaccatggtgagcaagggcgaggaggtcatcaaagagttcatgcgcttcaaggtgcgcatggagggctccatgaacggccacgagttcgagatcgagggcgagggcgagggccgcccctacgagggcacccagaccgccaagctgaaggtgaccaagggcggccccctgcccttcgcctgggacatcctgtccccccagttcatgtacggctccaaggcgtacgtgaagcaccccgccgacatccccgattacaagaagctgtccttccccgagggcttcaagtgggagcgcgtgatgaacttcgaggacggcggtctggtgaccgtgacccaggactcctccctgcaggacggcacgctgatctacaaggtgaagatgcgcggcaccaacttcccccccgacggccccgtaatgcagaagaagaccatgggctgggaggcctccaccgagcgcctgtacccccgcgacggcgtgctgaagggcgagatccaccaggccctgaagctgaaggacggcggccactacctggtggagttcaagaccatctacatggccaagaagcccgtgcaactgcccggctactactacgtggacaccaagctggacatcacctcccacaacgaggactacaccatcgtggaacagtacgagcgctccgagggccgccaccacctgttcctggggcatggcaccggcagcaccggcagcggcagctccggcaccgcctcctccgaggacaacaacatggccgttatcaaggaatttatgcgcttcaaagttaggatggagggatccatgaacggacatgagttcgagatcgagggagagggcgagggacgcccgtatgaaggcacacaaacagccaaactcaaggtcaccaagggcggaccactgcccttcgcctgggatatcctgagtccccagtttatgtacggcagcaaggcctacgttaagcaccccgctgacataccggactacaaaaagctgtcctttccggaaggcttcaagtgggagcgcgtgatgaatttcgaagacggaggactggtcactgtgacccaagatagcagtttgcaggacggtacactgatctataaggttaaaatgcgcggcactaactttccgccagatggcccagtgatgcagaagaagaccatgggttgggaggcatccaccgaacgtctgtaccctcgagacggagtgctcaagggcgagatccatcaggccctcaaactgaaagatggtggtcactacctggtcgaatttaagaccatttacatggccaagaagccggttcagctgcccggatattattatgtggatacgaaactggatataacttcgcataacgaagactacaccattgtcgagcagtatgagcgcagcgaaggccgacatcacctgttcctctacggcatggacgagctgtacaagtaggcggccgcgactctagatcataatcagccataccacatttgtagaggttttacttgctttaaaaaacctcccacacctccccctgaacctgaaacataaaatgaatgcaattgttgttgttaacttgtttattgcagcttataatggttacaaataaagcaatagcatcacaaatttcacaaataaagcatttttttcactgcattctagttgtggtttgtccaaactcatcaatgtatcttaaagcttgctagctcatcacaaacgaaactattataatcgtcttcaggggaacggtagcatcatatctgtcaccagtcagtcggattcctttctttcggcataaattatgctcgggtgacgagacgagttgaaaatcccgtaaattaaaacatataccacactcgccgtcctagacgacgacgacgacgacgattcccaaggaattgaacccttcatttgcatttcactaccgctctgagagatgcaaagcgcgccagacagtcgatcgaatctgcagaccagagagtcacatcaagaatgttgacattccaccagaagactctaattattcttcgctcgactgggaaaactgttaacaactgctcgagtgtggtcggagcggctcacagtgcgttttcccgtagacaaaaatcaaatttcatggtatttttcggcgataaacagtaagttaaagggaacccgaatttagtgctatataatttaattccactagagtttgtatcctttgatagatacgcgtatttcgacctcaactgcaaggccgtcgtgtactagacttgactaatccagactggtcttttagttatgacttctgtccacatctccatacattcaacgcactgtgcggctgtgctgtgcgactccgtcgagtcgaccaacatagttgaaacaaattgaatatttaattgatcgttataggaatggtgttagatgagtcatcctttacagtaagcacatacagtattataattgaagatcgtcggcagataggtgtgtagggtagagtatcagcaataagttgggacgtttgactttttgtaggtagacaaaaactaaactttttttcgcttctctatgtgtgcccctgggtagcgttccgttccgattggggtgcgaacgaatgaaatcgcccatcgagttgatacgtccatccatcgctagaaccgcgttcgctgtagaagactatataagagcagaggcaagagtagtgaaatgataggagccaagttctggggtcttagagctatgctggaaacagcatagcaagttaagataaggctagtccgttatcaacttgaaaaagtggcaccgagtcggtgctttttttggtggttgttcatcgattcctaatattgcagtgaagcagtttgttgtgcatggcgaagataaggttagggcgaggaatgccttggaaataagcggcactgggccgtatgaataaaaagcgttgaactttactacatgtagcatctactcaaaaacaaaatccacaaagtttactacacttttggtatgaataaaaaccttttcgaacatgtagtacctactactttaagaaaattctattcaaagtacagagtaatgctgcatgttaagaaaattccattcagagtgactcttgaaatcaataaaatcatgcatatatgccaaatttgtcacttattcacgtgacaaattatgtgaaaatatgaatattactacattcccgctatgcatcgcgtaatcgatcatgaaatttatgttggttatgtaactttacagtattccctttatgtgcatgtgaattttataatgatttgacaacaaggattttccttagaattttcgaattttagctagaaatctgtatcctatgaatgaatcttgagataacagcaattgtaacattataaagttcctaacattttcaagattccagtattgagtcgcgatcgcttaattaaccgcggatatgtcttgccgaagcacattaacccaagccatttatatatcaagtacaagttgatttgattctagtgatggactgacacgaatctatggcactgttgcagagcttacaaacaggtacccggagtcgcttcaattattcaatcatccattcaaaaacttccatctcttccaattagccaatattcaaattggaatccagccagccgacggaggcagatggtctacctggcaactatagagtttccatgtttccagactttccctcccggtaaacggagacaaaacgacagacgtaagtaggtacatatgcataccgcacggacaaatcaaatttgtctggcagctccaattagagtcgttaaaaatttaacgatgcgctaaataacttcaagctatttgtctcgctggattggcttcgagtggtaagatcctatcaaatgccgaaaacaaaaaactttcttcttaattgttcgttcttcaacacctctccatggtgataacggatacggtttcattgtcagcatccatcctccgaaaaatacattacgccttgaaatatgcaatcgcaaacacggatctgtttggaacatttattttactatgaagagatgcgataggtaatatttatttgagcgtttaagatactcattgttctctcaaagaatgtcattgaaagccaacgaggtcaaatcaaatattataataaaaaggtcaaagaggactaacttaaagctctctttatggataggaaaaaatattttcgcccatcgctagaacttttaccgtttccattgagtatataactaagatgaatgaggctaattgatgtctccgcaatacgccccgggtcttagagctatgctggaaacagcatagcaagttaagataaggctagtccgttatcaacttgaaaaagtggcaccgagtcggtgctttttttaagatgcttcggcaattaataataaggaatggtaaagcattcttcaaatgttactatgttctcaaattttcaagaattaggtattcaagaaattctttcaggcatattccataatctgcacaagcagctactttagaaattattgccgggcttaaattatatgtacaacatttcctgagtattttctgacaaaaattctcacaagggaaggtcacgatggagttacacggggtttttaaccggactatttttgttagattctacatgtcgaaatatgaaaaaccccaaagcctttcgggtgatggaccagtggtgtagccaggaggggctctgaaaggggtaattttgtacgtatattatattattaagctaattggaaatttgacaaaaatatttttttagtatttattgtgatggtagagaacaaaattgacattaatgtacgtttgaaatgtatttgccatgcctttggcgtactaacatggagtatggacaccaaaaccgatttcgtttaaacgatctcggatctgacaatgttcagtgcagagactcggctacgcctcgtggactttgaagttgaccaacaatgtttattcttacctctaatagtcctctgtggcaaggtcaagattctgttagaagccaatgaagaacctggttgttcaataacattttgttcgtctaatatttcactaccgcttgacgttggctgcacttcatgtacctcatctataaacgcttcttctgtatcgctctggacgtcatcttcacttacgtgatctgatatttcactgtcagaatcctcaccaacaagctcgtcatcgctttgcagaagagcagagaggatatgctcatcgtctaaagaactacccattttattatatattagtcacgatatctataacaagaaaatatatatataataagttatcacgtaagtagaacatgaaataacaatataattatcgtatgagttaaatcttaaaagtcacgtaaaagataatcatgcgtcattttgactcacgcggtcgttatagttcaaaatcagtgacacttaccgcattgacaagcacgcctcacgggagctccaagcggcgactgagatgtcctaaatgcacagcgacggattcgcgctatttagaaagagagagcaatatttcaagaatgcatgcgtcaattttacgcagactatctttctagggttaaaaaagatttgcgctttactcgacctaaactttaaacacgtcatagaatcttcgtttgacaaaaaccacattgtggccaagctgtgtgacgcgacgcgcgctaaagaatggcaaaccaagtcgcgcgagcgtcgactctagaggatccccgggtaccgagctcgaattcgtaatcatggtcatagctgtttcctgtgtgaaattgttatccgctcacaattccacacaacatacgagccggaagcataaagtgtaaagcctggggtgcctaatgagtgagctaactcacattaattgcgttgcgctcactgcccgctttccagtcgggaaacctgtcgtgccagctgcattaatgaatcggccaacgcgcggggagaggcggtttgcgtattgggcgctcttccgcttcctcgctcactgactcgctgcgctcggtcgttcggctgcggcgagcggtatcagctcactcaaaggcggtaatacggt

SEQ ID NO: 47 - DNA, 17008 bp, Artificial Sequence
  pBac- pBac-U6(AAEL017774)-sgDsx1-U6(AAEL017774)-sgIsx1-U6(AAEL017774)-s gBTub3-U6(AAEL017763)-sgBTub2-LongScaffold-3_UTR-3xp3-tdTomato-v3 - U6(AAEL017774)-sgDsx2-U6(AAEL017763)-sgDsx4
tatccacagaatcaggggataacgcaggaaagaacatgtgagcaaaaggccagcaaaaggccaggaaccgtaaaaaggccgcgttgctggcgtttttccataggctccgcccccctgacgagcatcacaaaaatcgacgctcaagtcagaggtggcgaaacccgacaggactataaagataccaggcgtttccccctggaagctccctcgtgcgctctcctgttccgaccctgccgcttaccggatacctgtccgcctttctcccttcgggaagcgtggcgctttctcaatgctcacgctgtaggtatctcagttcggtgtaggtcgttcgctccaagctgggctgtgtgcacgaaccccccgttcagcccgaccgctgcgccttatccggtaactatcgtcttgagtccaacccggtaagacacgacttatcgccactggcagcagccactggtaacaggattagcagagcgaggtatgtaggcggtgctacagagttcttgaagtggtggcctaactacggctacactagaaggacagtatttggtatctgcgctctgctgaagccagttaccttcggaaaaagagttggtagctcttgatccggcaaacaaaccaccgctggtagcggtggtttttttgtttgcaagcagcagattacgcgcagaaaaaaaggatctcaagaagatcctttgatcttttctacggggtctgacgctcagtggaacgaaaactcacgttaagggattttggtcatgagattatcaaaaaggatcttcacctagatccttttaaattaaaaatgaagttttaaatcaatctaaagtatatatgagtaaacttggtctgacagttaccaatgcttaatcagtgaggcacctatctcagcgatctgtctatttcgttcatccatagttgcctgactccccgtcgtgtagataactacgatacgggagggcttaccatctggccccagtgctgcaatgataccgcgagacccacgctcaccggctccagatttatcagcaataaaccagccagccggaagggccgagcgcagaagtggtcctgcaactttatccgcctccatccagtctattaattgttgccgggaagctagagtaagtagttcgccagttaatagtttgcgcaacgttgttgccattgctacaggcatcgtggtgtcacgctcgtcgtttggtatggcttcattcagctccggttcccaacgatcaaggcgagttacatgatcccccatgttgtgcaaaaaagcggttagctccttcggtcctccgatcgttgtcagaagtaagttggccgcagtgttatcactcatggttatggcagcactgcataattctcttactgtcatgccatccgtaagatgcttttctgtgactggtgagtactcaaccaagtcattctgagaatagtgtatgcggcgaccgagttgctcttgcccggcgtcaatacgggataataccgcgccacatagcagaactttaaaagtgctcatcattggaaaacgttcttcggggcgaaaactctcaaggatcttaccgctgttgagatccagttcgatgtaacccactcgtgcacccaactgatcttcagcatcttttactttcaccagcgtttctgggtgagcaaaaacaggaaggcaaaatgccgcaaaaaagggaataagggcgacacggaaatgttgaatactcatactcttcctttttcaatattattgaagcatttatcagggttattgtctcatgagcggatacatatttgaatgtatttagaaaaataaacaaataggggttccgcgcacatttccccgaaaagtgccacctgacgtctaagaaaccattattatcatgacattaacctataaaaataggcgtatcacgaggccctttcgtctcgcgcgtttcggtgatgacggtgaaaacctctgacacatgcagctcccggagacggtcacagcttgtctgtaagcggatgccgggagcagacaagcccgtcagggcgcgtcagcgggtgttggcgggtgtcggggctggcttaactatgcggcatcagagcagattgtactgagagtgcaccatatgcggtgtgaaataccgcacagatgcgtaaggagaaaataccgcatcaggcgccattcgccattcaggctgcgcaactgttgggaagggcgatcggtgcgggcctcttcgctattacgccagctggcgaaagggggatgtgctgcaaggcgattaagttgggtaacgccagggttttcccagtcacgacgttgtaaaacgacggccagtgccaagctttgtttaaaatataacaaaattgtgatcccacaaaatgaagtggggcaaaatcaaataattaactagtgtccgtaaacttgttggtcttcaactttttgaggaacacgttggacggcaaatcgtgactataacacaagttgatttaataattttagccaacacgtcgggctgcgtgttttttgcgctctgtgtacacgttgattaactggtcgattaaataatttaatttttggttcttctttaaatctgtgatgaaattttttaaaataactttaaattcttcattggtaaaaaatgccacgttttgcaacttgtgagggtctaatatgaggtcaaactcagtaggagttttatccaaaaaagaaaacatgattacgtctgtacacgaacgcgtattaacgcagagtgcaaagtataagagggttaaaaaatatattttacgcaccatatacgcatcgggttgatatcgttaatatggatcaatttgaacagttgattaacgtgtctctgctcaagtctttgatcaaaacgcaaatcgacgaaaatgtgtcggacaatatcaagtcgatgagcgaaaaactaaaaaggctagaatacgacaatctcacagacagcgttgagatatacggtattcacgacagcaggctgaataataaaaaaattagaaactattatttaaccctagaaagataatcatattgtgacgtacgttaaagataatcatgcgtaaaattgacgcatgtgttttatcggtctgtatatcgaggtttatttattaatttgaatagatattaagttttattatatttacacttacatactaataataaattcaacaaacaatttatttatgtttatttatttattaaaaaaaaacaaaaactcaaaatttcttctataaagtaacaaaacttttaaacattctctcttttacaaaaataaacttattttgtactttaaaaacagtcatgttgtattataaaataagtaattagcttaacttatacataatagaaacaaattatacttattagtcagtcagaaacaactttggcacatatcaatattatgctctcgacaaataacttttttgcattttttgcacgatgcatttgcctttcgccttattttagaggggcagtaagtacagtaagtacgttttttcattactggctcttcagtactgtcatctgatgtaccaggcacttcatttggcaaaatattagagatattatcgcgcaaatatctcttcaaagtaggagcttctaaacgcttacgcataaacgatgacgtcaggctcatgtaaaggtttctcataaattttttgcgactttgaaccttttctcccttgctactgacattatggctgtatataataaaagaatttatgcaggcaatgtttatcattccgtacaataatgccataggccacctattcgtcttcctactgcaggtcatcacagaacacatttggtctagcgtgtccactccgcctttagtttgattataatacataaccatttgcggtttaccggtactttcgttgatagaagcatcctcatcacaagatgataataagtataccatcttagctggcttcggtttatatgagacgagagtaaggggtccgtcaaaacaaaacatcgatgttcccactggcctggagcgactgtttttcagtacttccggtatctcgcgtttgtttgatcgcacggttcccacaatggttaattcgagctcgcccgggctcctaggagatcttcatcacaaacgaaactattataatcgtcttcaggggaacggtagcatcatatctgtcaccagtcagtcggattcctttctttcggcataaattatgctcgggtgacgagacgagttgaaaatcccgtaaattaaaacatataccacactcgccgtcctagacgacgacgacgacgacgattcccaaggaattgaacccttcatttgcatttcactaccgctctgagagatgcaaagcgcgccagacagtcgatcgaatctgcagaccagagagtcacatcaagaatgttgacattccaccagaagactctaattattcttcgctcgactgggaaaactgttaacaactgctcgagtgtggtcggagcggctcacagtgcgttttcccgtagacaaaaatcaaatttcatggtatttttcggcgataaacagtaagttaaagggaacccgaatttagtgctatataatttaattccactagagtttgtatcctttgatagatacgcgtatttcgacctcaactgcaaggccgtcgtgtactagacttgactaatccagactggtcttttagttatgacttctgtccacatctccatacattcaacgcactgtgcggctgtgctgtgcgactccgtcgagtcgaccaacatagttgaaacaaattgaatatttaattgatcgttataggaatggtgttagatgagtcatcctttacagtaagcacatacagtattataattgaagatcgtcggcagataggtgtgtagggtagagtatcagcaataagttgggacgtttgactttttgtaggtagacaaaaactaaactttttttcgcttctctatgtgtgcccctgggtagcgttccgttccgattggggtgcgaacgaatgaaatcgcccatcgagttgatacgtccatccatcgctagaaccgcgttcgctgtagaagactatataagagcagaggcaagagtagtgaaatagcgacatgcagccattctggtcttagagctatgctggaaacagcatagcaagttaagataaggctagtccgttatcaacttgaaaaagtggcaccgagtcggtgctttttttggtggttgttcatcgattcctaatattgcagtgaagcagtttgttgtgcatggcgaagataaggttagggcgaggaatgccttggaaataagcggcactgggccgtatgaataaaaagcgttgaactttactacatgtagcatctactcaaaaacaaaatccacaaagtttactacacttttggtatgaataaaaaccttttcgaacatgtagtacctactactttaagaaaattctattcaaagtacagagtaatgctgcatgttaagaaaattccattcagagtgactcttgaaatcaataaaatcatgcatatatgccaaatttgtcacttattcacgtgacaaattatgtgaaaatatgaatattactacattcccgctatgcatcgcgtaatcgatcatgaaatttatgttggttatgtaactttacagtattccctttatgtgcatgtgaattttataatgatttgacaacaaggattttccttagaattttcgaattttagctagaaatctgtatcctatgaatgaatcttgagataacagcaattgtaacattataaagttcctaacattttcaagattccagtattgagtcgcgatcgcttaattaaccgcggtcatcacaaacgaaactattataatcgtcttcaggggaacggtagcatcatatctgtcaccagtcagtcggattcctttctttcggcataaattatgctcgggtgacgagacgagttgaaaatcccgtaaattaaaacatataccacactcgccgtcctagacgacgacgacgacgacgattcccaaggaattgaacccttcatttgcatttcactaccgctctgagagatgcaaagcgcgccagacagtcgatcgaatctgcagaccagagagtcacatcaagaatgttgacattccaccagaagactctaattattcttcgctcgactgggaaaactgttaacaactgctcgagtgtggtcggagcggctcacagtgcgttttcccgtagacaaaaatcaaatttcatggtatttttcggcgataaacagtaagttaaagggaacccgaatttagtgctatataatttaattccactagagtttgtatcctttgatagatacgcgtatttcgacctcaactgcaaggccgtcgtgtactagacttgactaatccagactggtcttttagttatgacttctgtccacatctccatacattcaacgcactgtgcggctgtgctgtgcgactccgtcgagtcgaccaacatagttgaaacaaattgaatatttaattgatcgttataggaatggtgttagatgagtcatcctttacagtaagcacatacagtattataattgaagatcgtcggcagataggtgtgtagggtagagtatcagcaataagttgggacgtttgactttttgtaggtagacaaaaactaaactttttttcgcttctctatgtgtgcccctgggtagcgttccgttccgattggggtgcgaacgaatgaaatcgcccatcgagttgatacgtccatccatcgctagaaccgcgttcgctgtagaagactatataagagcagaggcaagagtagtgaaatgcgggattcgctctcgacgagtcttagagctatgctggaaacagcatagcaagttaagataaggctagtccgttatcaacttgaaaaagtggcaccgagtcggtgctttttttggtggttgttcatcgattcctaatattgcagtgaagcagtttgttgtgcatggcgaagataaggttagggcgaggaatgccttggaaataagcggcactgggccgtatgaataaaaagcgttgaactttactacatgtagcatctactcaaaaacaaaatccacaaagtttactacacttttggtatgaataaaaaccttttcgaacatgtagtacctactactttaagaaaattctattcaaagtacagagtaatgctgcatgttaagaaaattccattcagagtgactcttgaaatcaataaaatcatgcatatatgccaaatttgtcacttattcacgtgacaaattatgtgaaaatatgaatattactacattcccgctatgcatcgcgtaatcgatcatgaaatttatgttggttatgtaactttacagtattccctttatgtgcatgtgaattttataatgatttgacaacaaggattttccttagaattttcgaattttagctagaaatctgtatcctatgaatgaatcttgagataacagcaattgtaacattataaagttcctaacattttcaagattccagtattgaggccttttgggcccatttaaatcttaagtcatcacaaacgaaactattataatcgtcttcaggggaacggtagcatcatatctgtcaccagtcagtcggattcctttctttcggcataaattatgctcgggtgacgagacgagttgaaaatcccgtaaattaaaacatataccacactcgccgtcctagacgacgacgacgacgacgattcccaaggaattgaacccttcatttgcatttcactaccgctctgagagatgcaaagcgcgccagacagtcgatcgaatctgcagaccagagagtcacatcaagaatgttgacattccaccagaagactctaattattcttcgctcgactgggaaaactgttaacaactgctcgagtgtggtcggagcggctcacagtgcgttttcccgtagacaaaaatcaaatttcatggtatttttcggcgataaacagtaagttaaagggaacccgaatttagtgctatataatttaattccactagagtttgtatcctttgatagatacgcgtatttcgacctcaactgcaaggccgtcgtgtactagacttgactaatccagactggtcttttagttatgacttctgtccacatctccatacattcaacgcactgtgcggctgtgctgtgcgactccgtcgagtcgaccaacatagttgaaacaaattgaatatttaattgatcgttataggaatggtgttagatgagtcatcctttacagtaagcacatacagtattataattgaagatcgtcggcagataggtgtgtagggtagagtatcagcaataagttgggacgtttgactttttgtaggtagacaaaaactaaactttttttcgcttctctatgtgtgcccctgggtagcgttccgttccgattggggtgcgaacgaatgaaatcgcccatcgagttgatacgtccatccatcgctagaaccgcgttcgctgtagaagactatataagagcagaggcaagagtagtgaaatgataggagccaagttctggggtcttagagctatgctggaaacagcatagcaagttaagataaggctagtccgttatcaacttgaaaaagtggcaccgagtcggtgctttttttggtggttgttcatcgattcctaatattgcagtgaagcagtttgttgtgcatggcgaagataaggttagggcgaggaatgccttggaaataagcggcactgggccgtatgaataaaaagcgttgaactttactacatgtagcatctactcaaaaacaaaatccacaaagtttactacacttttggtatgaataaaaaccttttcgaacatgtagtacctactactttaagaaaattctattcaaagtacagagtaatgctgcatgttaagaaaattccattcagagtgactcttgaaatcaataaaatcatgcatatatgccaaatttgtcacttattcacgtgacaaattatgtgaaaatatgaatattactacattcccgctatgcatcgcgtaatcgatcatgaaatttatgttggttatgtaactttacagtattccctttatgtgcatgtgaattttataatgatttgacaacaaggattttccttagaattttcgaattttagctagaaatctgtatcctatgaatgaatcttgagataacagcaattgtaacattataaagttcctaacattttcaagattccagtattgagtcgcgatcgcttaattaaccgcggatatgtcttgccgaagcacattaacccaagccatttatatatcaagtacaagttgatttgattctagtgatggactgacacgaatctatggcactgttgcagagcttacaaacaggtacccggagtcgcttcaattattcaatcatccattcaaaaacttccatctcttccaattagccaatattcaaattggaatccagccagccgacggaggcagatggtctacctggcaactatagagtttccatgtttccagactttccctcccggtaaacggagacaaaacgacagacgtaagtaggtacatatgcataccgcacggacaaatcaaatttgtctggcagctccaattagagtcgttaaaaatttaacgatgcgctaaataacttcaagctatttgtctcgctggattggcttcgagtggtaagatcctatcaaatgccgaaaacaaaaaactttcttcttaattgttcgttcttcaacacctctccatggtgataacggatacggtttcattgtcagcatccatcctccgaaaaatacattacgccttgaaatatgcaatcgcaaacacggatctgtttggaacatttattttactatgaagagatgcgataggtaatatttatttgagcgtttaagatactcattgttctctcaaagaatgtcattgaaagccaacgaggtcaaatcaaatattataataaaaaggtcaaagaggactaacttaaagctctctttatggataggaaaaaatattttcgcccatcgctagaacttttaccgtttccattgagtatataactaagatgaatgaggctaattgatgtctccgcaatacgccccgggtcttagagctatgctggaaacagcatagcaagttaagataaggctagtccgttatcaacttgaaaaagtggcaccgagtcggtgctttttttaagatgcttcggcaattaataataaggaatggtaaagcattcttcaaatgttactatgttctcaaattttcaagaattaggtattcaagaaattctttcaggcatattccataatctgcacaagcagctactttagaaattattgccgggcttaaattatatgtacaacatttcctgagtattttctgacaaaaattctcacaagggaaggtcacgatggagttacacggggtttttaaccggactatttttgttagattctacatgtcgaaatatgaaaaaccccaaagcctttcgggtgatggaccagtggtgtagccaggaggggctctgaaaggggtaattttgtacgtatattatattattaagctaattggaaatttgacaaaaatatttttttagtatttattgtgatggtagagaacaaaattgacattaatgtacgtttgaaatgtatttgccatgcctttggcgtactaacatggagtatggacaccaaaaccgatttcgctagcgtttaaacggcgcgccaattcgagctcgcccggggatctaattcaattagagactaattcaattagagctaattcaattaggatccaagcttatcgatttcgaaccctcgaccgccggagtataaatagaggcgcttcgtctacggagcgacaattcaattcaaacaagcaaagtgaacacgtcgctaagcgaaagctaagcaaataaacaagcgcagctgaacaagctaaacaatcggggtaccgctagagtcgacggtacgatccaccggtcgccaccatggtgagcaagggcgaggaggtcatcaaagagttcatgcgcttcaaggtgcgcatggagggctccatgaacggccacgagttcgagatcgagggcgagggcgagggccgcccctacgagggcacccagaccgccaagctgaaggtgaccaagggcggccccctgcccttcgcctgggacatcctgtccccccagttcatgtacggctccaaggcgtacgtgaagcaccccgccgacatccccgattacaagaagctgtccttccccgagggcttcaagtgggagcgcgtgatgaacttcgaggacggcggtctggtgaccgtgacccaggactcctccctgcaggacggcacgctgatctacaaggtgaagatgcgcggcaccaacttcccccccgacggccccgtaatgcagaagaagaccatgggctgggaggcctccaccgagcgcctgtacccccgcgacggcgtgctgaagggcgagatccaccaggccctgaagctgaaggacggcggccactacctggtggagttcaagaccatctacatggccaagaagcccgtgcaactgcccggctactactacgtggacaccaagctggacatcacctcccacaacgaggactacaccatcgtggaacagtacgagcgctccgagggccgccaccacctgttcctggggcatggcaccggcagcaccggcagcggcagctccggcaccgcctcctccgaggacaacaacatggccgttatcaaggaatttatgcgcttcaaagttaggatggagggatccatgaacggacatgagttcgagatcgagggagagggcgagggacgcccgtatgaaggcacacaaacagccaaactcaaggtcaccaagggcggaccactgcccttcgcctgggatatcctgagtccccagtttatgtacggcagcaaggcctacgttaagcaccccgctgacataccggactacaaaaagctgtcctttccggaaggcttcaagtgggagcgcgtgatgaatttcgaagacggaggactggtcactgtgacccaagatagcagtttgcaggacggtacactgatctataaggttaaaatgcgcggcactaactttccgccagatggcccagtgatgcagaagaagaccatgggttgggaggcatccaccgaacgtctgtaccctcgagacggagtgctcaagggcgagatccatcaggccctcaaactgaaagatggtggtcactacctggtcgaatttaagaccatttacatggccaagaagccggttcagctgcccggatattattatgtggatacgaaactggatataacttcgcataacgaagactacaccattgtcgagcagtatgagcgcagcgaaggccgacatcacctgttcctctacggcatggacgagctgtacaagtaggcggccgcgactctagatcataatcagccataccacatttgtagaggttttacttgctttaaaaaacctcccacacctccccctgaacctgaaacataaaatgaatgcaattgttgttgttaacttgtttattgcagcttataatggttacaaataaagcaatagcatcacaaatttcacaaataaagcatttttttcactgcattctagttgtggtttgtccaaactcatcaatgtatcttaaagcttgctagctcatcacaaacgaaactattataatcgtcttcaggggaacggtagcatcatatctgtcaccagtcagtcggattcctttctttcggcataaattatgctcgggtgacgagacgagttgaaaatcccgtaaattaaaacatataccacactcgccgtcctagacgacgacgacgacgacgattcccaaggaattgaacccttcatttgcatttcactaccgctctgagagatgcaaagcgcgccagacagtcgatcgaatctgcagaccagagagtcacatcaagaatgttgacattccaccagaagactctaattattcttcgctcgactgggaaaactgttaacaactgctcgagtgtggtcggagcggctcacagtgcgttttcccgtagacaaaaatcaaatttcatggtatttttcggcgataaacagtaagttaaagggaacccgaatttagtgctatataatttaattccactagagtttgtatcctttgatagatacgcgtatttcgacctcaactgcaaggccgtcgtgtactagacttgactaatccagactggtcttttagttatgacttctgtccacatctccatacattcaacgcactgtgcggctgtgctgtgcgactccgtcgagtcgaccaacatagttgaaacaaattgaatatttaattgatcgttataggaatggtgttagatgagtcatcctttacagtaagcacatacagtattataattgaagatcgtcggcagataggtgtgtagggtagagtatcagcaataagttgggacgtttgactttttgtaggtagacaaaaactaaactttttttcgcttctctatgtgtgcccctgggtagcgttccgttccgattggggtgcgaacgaatgaaatcgcccatcgagttgatacgtccatccatcgctagaaccgcgttcgctgtagaagactatataagagcagaggcaagagtagtgaaatctcacaagtagagctacacggtcttagagctatgctggaaacagcatagcaagttaagataaggctagtccgttatcaacttgaaaaagtggcaccgagtcggtgctttttttggtggttgttcatcgattcctaatattgcagtgaagcagtttgttgtgcatggcgaagataaggttagggcgaggaatgccttggaaataagcggcactgggccgtatgaataaaaagcgttgaactttactacatgtagcatctactcaaaaacaaaatccacaaagtttactacacttttggtatgaataaaaaccttttcgaacatgtagtacctactactttaagaaaattctattcaaagtacagagtaatgctgcatgttaagaaaattccattcagagtgactcttgaaatcaataaaatcatgcatatatgccaaatttgtcacttattcacgtgacaaattatgtgaaaatatgaatattactacattcccgctatgcatcgcgtaatcgatcatgaaatttatgttggttatgtaactttacagtattccctttatgtgcatgtgaattttataatgatttgacaacaaggattttccttagaattttcgaattttagctagaaatctgtatcctatgaatgaatcttgagataacagcaattgtaacattataaagttcctaacattttcaagattccagtattgagtcgcgatcgcttaattaaccgcggatatgtcttgccgaagcacattaacccaagccatttatatatcaagtacaagttgatttgattctagtgatggactgacacgaatctatggcactgttgcagagcttacaaacaggtacccggagtcgcttcaattattcaatcatccattcaaaaacttccatctcttccaattagccaatattcaaattggaatccagccagccgacggaggcagatggtctacctggcaactatagagtttccatgtttccagactttccctcccggtaaacggagacaaaacgacagacgtaagtaggtacatatgcataccgcacggacaaatcaaatttgtctggcagctccaattagagtcgttaaaaatttaacgatgcgctaaataacttcaagctatttgtctcgctggattggcttcgagtggtaagatcctatcaaatgccgaaaacaaaaaactttcttcttaattgttcgttcttcaacacctctccatggtgataacggatacggtttcattgtcagcatccatcctccgaaaaatacattacgccttgaaatatgcaatcgcaaacacggatctgtttggaacatttattttactatgaagagatgcgataggtaatatttatttgagcgtttaagatactcattgttctctcaaagaatgtcattgaaagccaacgaggtcaaatcaaatattataataaaaaggtcaaagaggactaacttaaagctctctttatggataggaaaaaatattttcgcccatcgctagaacttttaccgtttccattgagtatataactaagatgaatgaggctaattgatctgtcgtcgtttttttccgggtcttagagctatgctggaaacagcatagcaagttaagataaggctagtccgttatcaacttgaaaaagtggcaccgagtcggtgctttttttaagatgcttcggcaattaataataaggaatggtaaagcattcttcaaatgttactatgttctcaaattttcaagaattaggtattcaagaaattctttcaggcatattccataatctgcacaagcagctactttagaaattattgccgggcttaaattatatgtacaacatttcctgagtattttctgacaaaaattctcacaagggaaggtcacgatggagttacacggggtttttaaccggactatttttgttagattctacatgtcgaaatatgaaaaaccccaaagcctttcgggtgatggaccagtggtgtagccaggaggggctctgaaaggggtaattttgtacgtatattatattattaagctaattggaaatttgacaaaaatatttttttagtatttattgtgatggtagagaacaaaattgacattaatgtacgtttgaaatgtatttgccatgcctttggcgtactaacatggagtatggacaccaaaaccgatttcgtttaaacgatctcggatctgacaatgttcagtgcagagactcggctacgcctcgtggactttgaagttgaccaacaatgtttattcttacctctaatagtcctctgtggcaaggtcaagattctgttagaagccaatgaagaacctggttgttcaataacattttgttcgtctaatatttcactaccgcttgacgttggctgcacttcatgtacctcatctataaacgcttcttctgtatcgctctggacgtcatcttcacttacgtgatctgatatttcactgtcagaatcctcaccaacaagctcgtcatcgctttgcagaagagcagagaggatatgctcatcgtctaaagaactacccattttattatatattagtcacgatatctataacaagaaaatatatatataataagttatcacgtaagtagaacatgaaataacaatataattatcgtatgagttaaatcttaaaagtcacgtaaaagataatcatgcgtcattttgactcacgcggtcgttatagttcaaaatcagtgacacttaccgcattgacaagcacgcctcacgggagctccaagcggcgactgagatgtcctaaatgcacagcgacggattcgcgctatttagaaagagagagcaatatttcaagaatgcatgcgtcaattttacgcagactatctttctagggttaaaaaagatttgcgctttactcgacctaaactttaaacacgtcatagaatcttcgtttgacaaaaaccacattgtggccaagctgtgtgacgcgacgcgcgctaaagaatggcaaaccaagtcgcgcgagcgtcgactctagaggatccccgggtaccgagctcgaattcgtaatcatggtcatagctgtttcctgtgtgaaattgttatccgctcacaattccacacaacatacgagccggaagcataaagtgtaaagcctggggtgcctaatgagtgagctaactcacattaattgcgttgcgctcactgcccgctttccagtcgggaaacctgtcgtgccagctgcattaatgaatcggccaacgcgcggggagaggcggtttgcgtattgggcgctcttccgcttcctcgctcactgactcgctgcgctcggtcgttcggctgcggcgagcggtatcagctcactcaaaggcggtaatacggt

SEQ ID NO: 48 - DNA, 60 bp, Artificial Sequence
  Primer
cgcttgcttgaatagaattctcatcggcgcgcctttttgctcacctgtgattgctcctac

SEQ ID NO: 49 - DNA, 60 bp, Artificial Sequence
  Primer
aaacttccggagccggtaccgccacgacgttaaattgaaaataggtctatatatacgaac

SEQ ID NO: 50 - DNA, 60 bp, Artificial Sequence
  Primer
acctattttcaatttaacgtcgtggcggtaccggctccggaagttttagagctagaaata

SEQ ID NO: 51 - DNA, 60 bp, Artificial Sequence
  Primer
cactgaacattgtcagatccgagatcggccggcctaggatgcatacgcattaagcgaaca

SEQ ID NO: 52 - DNA, 60 bp, Artificial Sequence
  Primer
aaacccagctggtgcacactcaagcgacgttaaattgaaaataggtctatatatacgaac

SEQ ID NO: 53 - DNA, 60 bp, Artificial Sequence
  Primer
acctattttcaatttaacgtcgcttgagtgtgcaccagctgggttttagagctagaaata

SEQ ID NO: 54 - DNA, 60 bp, Artificial Sequence
  Primer
aaacccgatctggttaccgcattgcgacgttaaattgaaaataggtctatatatacgaac

SEQ ID NO: 55 - DNA, 60 bp, Artificial Sequence
  Primer
acctattttcaatttaacgtcgcaatgcggtaaccagatcgggttttagagctagaaata

SEQ ID NO: 56 - DNA, 60 bp, Artificial Sequence
  Primer
aaacacatctttagaccccgaggccgacgttaaattgaaaataggtctatatatacgaac

SEQ ID NO: 57 - DNA, 60 bp, Artificial Sequence
  Primer
acctattttcaatttaacgtcggcctcggggtctaaagatgtgttttagagctagaaata

SEQ ID NO: 58 - DNA, 20 bp, Aedes aegypti
gcgggattcgctctcgacga

SEQ ID NO: 59 - DNA, 20 bp, Aedes aegypti
ggacaacatttccaaggtta

SEQ ID NO: 60 - DNA, 20 bp, Aedes aegypti
gcactagtgggatatcctga

SEQ ID NO: 61 - DNA, 20 bp, Aedes aegypti
gtccaggaagcatttggtat

SEQ ID NO: 62 - DNA, 20 bp, Aedes aegypti
gtgtagactggccctaacgg

SEQ ID NO: 63 - DNA, 20 bp, Aedes aegypti
tctcgttccccaaacacttg

SEQ ID NO: 64 - DNA, 20 bp, Aedes aegypti
tcatcaagaacatgttcagg

SEQ ID NO: 65 - DNA, 20 bp, Aedes aegypti
acagttggaaccgaacgctg

SEQ ID NO: 66 - DNA, 20 bp, Drosophila suzukii
gctacagaggaatggcccag

SEQ ID NO: 67 - DNA, 20 bp, Drosophila suzukii
ggatcgggataacctgccgt

SEQ ID NO: 68 - DNA, 20 bp, Drosophila suzukii
gagaatccccttgttgcggg

SEQ ID NO: 69 - DNA, 20 bp, Drosophila suzukii
gagctctgaccatccgcatg

SEQ ID NO: 70 - DNA, 20 bp, Drosophila suzukii
ggtgttggacagcacatcga

SEQ ID NO: 71 - DNA, 20 bp, Drosophila suzukii
gagcacacgtgatcgcaaga

SEQ ID NO: 72 - DNA, 20 bp, Drosophila suzukii
caacctcaagttgtaccaag

SEQ ID NO: 73 - DNA, 20 bp, Drosophila suzukii
ggattatccaaaactaagca

SEQ ID NO: 74 - DNA, 20 bp, Drosophila suzukii
gcaactgcaaacgcattccg

SEQ ID NO: 75 - DNA, 20 bp, Drosophila suzukii
gcccaagttgcacctgcagg

SEQ ID NO: 76 - DNA, 20 bp, Drosophila suzukii
gatcacagcgagttcttcgg

SEQ ID NO: 77 - DNA, 20 bp, Drosophila suzukii
ggagttggggtcgtcgacat

SEQ ID NO: 78 - DNA, 20 bp, Drosophila suzukii
ggcgtcaagttcaagaagca

SEQ ID NO: 79 - DNA, 20 bp, Drosophila suzukii
gagaacgggacactggcagg

SEQ ID NO: 80 - DNA, 20 bp, Drosophila suzukii
gacttctcgtaggtgcgcaa

SEQ ID NO: 81 - DNA, 20 bp, Drosophila suzukii
gtaggtgcgcaatggtaaga

SEQ ID NO: 82 - DNA, 20 bp, Drosophila suzukii
ggcggcagcggcgggaatgg

SEQ ID NO: 83 - DNA, 20 bp, Drosophila suzukii
tggcggtaccggctccggaa

SEQ ID NO: 84 - DNA, 20 bp, Drosophila suzukii
cttgagtgtgcaccagctgg

SEQ ID NO: 85 - DNA, 20 bp, Drosophila suzukii
caatgcggtaaccagatcgg

SEQ ID NO: 86 - DNA, 20 bp, Drosophila suzukii
gcctcggggtctaaagatgt

SEQ ID NO: 87 - DNA, 20 bp, Aedes aegypti
agcgacatgcagccattctg

SEQ ID NO: 88 - DNA, 20 bp, Aedes aegypti
ctcacaagtagagctacacg

SEQ ID NO: 89 - DNA, 20 bp, Aedes aegypti
ggtagctggccgttgccaaa

SEQ ID NO: 90 - DNA, 20 bp, Aedes aegypti
ctgtcgtcgtttttttccgg

SEQ ID NO: 91 - DNA, 20 bp, Aedes aegypti
ggatattggtacgacccggg

SEQ ID NO: 92 - DNA, 19 bp, Aedes aegypti
gtattcgatgttctccacc

SEQ ID NO: 93 - DNA, 20 bp, Aedes aegypti
gaaggcatatcaaacattcg

SEQ ID NO: 94 - DNA, 20 bp, Aedes aegypti
gttaagaactcggccatcga

SEQ ID NO: 95 - DNA, 20 bp, Aedes aegypti
gcaagttaagcctgaaacaa

SEQ ID NO: 96 - DNA, 20 bp, Aedes aegypti
tactacaacgaggctaccgg

SEQ ID NO: 97 - DNA, 20 bp, Aedes aegypti
gtctccgcaatacgccccgg

SEQ ID NO: 98 - DNA, 20 bp, Aedes aegypti
gataggagccaagttctggg

SEQ ID NO: 99 - DNA, 20 bp, Aedes aegypti
cactatggattcggtccgag

SEQ ID NO: 100 - DNA, 20 bp, Drosophila suzukii
gattgtcaactacttgcccc
